(19) United States
(12) Patent Application Publication
(10) Pub. No.: US 2026/0176607 A1
(43) Pub. Date: Jun. 25, 2026

(54) ALTERED CYTIDINE DEAMINASES AND METHODS OF USE

(71) Applicant: ILLUMINA, INC., San Diego, CA (US)

(72) Inventors: Dewei Joel Toh, Singapore (SG); Lekha Ravichandraprabhu, Singapore (SG); Anna Traczyk, Singapore (SG); Eric Brustad, San Diego, CA (US); Shu Ting Tan, Singapore (SG); Zahra Fahmi, Cambridge (GB); Saurabh Nirantar, Singapore (SG); Gaetano Speciale, San Diego, CA (US); June Pais, San Diego, CA (US); Bridget Dorsey, San Diego, CA (US); Stephanie Silva, San Diego, CA (US); Xiangyuan Yang, Singapore (SG); Abdul Sadeer Abd Salam, Singapore (SG)

(73) Assignee: ILLUMINA, INC., San Diego, CA (US)

(21) Appl. No.: 19/422,936

(22) Filed: Dec. 17, 2025

Related U.S. Application Data
(63) Continuation of application No. PCT/US2024/049016, filed on Sep. 27, 2024.
(60) Provisional application No. 63/541,077, filed on Sep. 28, 2023.
(60) Provisional application No. 63/541,084, filed on Sep. 28, 2023.
(60) Provisional application No. 63/541,092, filed on Sep. 28, 2023.
(60) Provisional application No. 63/541,097, filed on Sep. 28, 2023.
(60) Provisional application No. 63/541,099, filed on Sep. 28, 2023.

(51) Int. Cl. C12N 9/78; C12N 15/10

(52) U.S. Cl. CPC C12N 9/78; C12N 15/1093; C12Y 305/04005

(57) ABSTRACT

The present disclosure is concerned with modified proteins, methods, compositions, and kits for mapping of methylation status of nucleic acids, including 5-methylcytosine and 5-hydroxymethyl cytosine (5hmC). The proteins selectively act on certain modified cytosines of target nucleic acids and include one or more substitution mutations that enhance the selectivity of the proteins for certain modified cytosines, enhance the stability of the proteins, or enhance both selectivity and stability. Also provided are compositions and kits that include one or more of the proteins and methods for using one or more of the proteins.

### CROSS-REFERENCE TO RELATED APPLICATIONS

[0001] This application is a continuation under 35 U.S.C. 111 (a) of International Application No. PCT/US2024/049016, filed Sep. 27, 2024, which claims the benefit of U.S.

[0002] Provisional Application Ser. No. 63/541,077, filed on Sep. 28, 2023, U.S. Provisional Application Ser. No. 63/541,084, filed on Sep. 28, 2023, U.S. Provisional Application Ser. No. 63/541,092, filed on Sep. 28, 2023, U.S. Provisional Application Ser. No. 63/541,097, filed on Sep. 28, 2023, and U.S. Provisional Application Ser. No. 63/541,099, filed on Sep. 28, 2023. The disclosure of any priority document claimed is incorporated by reference herein in their entirety.

### SEQUENCE LISTING

[0003] This application contains a Sequence Listing electronically submitted via Patent Center to the United States Patent and Trademark Office as an XML file entitled “2674_US01.xml” having a size of 1,389,713 bytes and created on Mar. 13, 2026. The information contained in the Sequence Listing is incorporated by reference herein.

### FIELD

[0004] Embodiments of the present disclosure relate to modified proteins, methods, compositions, and kits for mapping of nucleotide methylation status.

### BACKGROUND

[0005] Modified DNA cytosines, including 5-methylcytosine (5mC) and 5-hydroxymethyl cytosine (5hmC), are a well-studied epigenetic modification that play fundamental roles in human development and disease. Its genome-wide distribution differs between tissue types, and between healthy and diseased states. In recent years, 5mC has also gained prominence as a tool for clinical diagnostics: its distribution in cell-free DNA (cfDNA)-obtained from a liquid biopsy-can be used for the tissue-specific prediction of early-stage cancer or monitoring of cancer recurrence or remission after treatment. As a result, there has been an intense focus on developing methods for mapping modified DNA cytosines at single base resolution, with minimal loss of sample DNA quantity, quality, and complexity. Current methods for mapping modified DNA cytosines, however, often exhibit limitations including (i) degradation of sample DNA due to prolonged chemical treatment at non-neutral pH and high temperatures, (ii) loss of sample DNA complexity due to conversion of unmethylated DNA bases to uracil, resulting in low complexity genome mapping, (iii) multi-step conversion, requiring both enzymes and chemical treatment, and (iv) for antibody-based 5mC detection, resolution of detection is limited to ˜150 bp, precluding the identification of its exact location in the genome.

[0006] 5-hydroxymethylcytosine (5hmC) is an oxidized derivative of the widely studied epigenetic modification 5-methylcytosine (5mC). It is the second most abundant modified DNA base and is also known as the 6th base of the genome. 5hmC distribution seems to be highly tissue-specific (Li et al., J Nucleic Acids. 2011; 2011:870726. doi: 10.4061/2011/870726), as it varies from 0.40-0.65% in brain, liver, kidney and colorectal tissues, to ˜0.18% in lung and 0.05%-0.06% in heart, breast, and placenta. In cancerous colorectal tissues, 5hmC abundance is reduced to 0.02-0.06%. Mapping and detecting changes in 5hmC levels could serve as biomarker for various diseases. As such, there is widespread interest in determining the localization of 5hmC in DNA from healthy and diseased patients. The majority of methods for mapping 5hmC require bisulfite treatment, which results in significant DNA loss and damage. Recent methods for mapping 5hmC have been developed, such as oxBS-seq, TAB-seq, and ACE-seq, but some include bisulfite treatment, and all involve multiple steps using different enzymes.

### SUMMARY OF THE APPLICATION

[0007] Provided herein are altered cytidine deaminases that include one or more selectivity-enhancing alterations, preferably two or more selectivity-enhancing alterations. The altered cytidine deaminase can have 5mC-preferring activity (conversion of 5-methyl cytosine (5mC) to thymidine (T) by deamination occurs at a greater rate than conversion of cytosine (C) to uracil (U) by deamination), 5hmC-deficient activity (converts C to U and 5mC to T by deamination where the rate of deamination of C and 5mC is greater than the rate of conversion of 5hmC to 5hmU by deamination), 5mC- and 5hmC-preferring activity (converts 5hmC to 5hmU and 5mC to T by deamination, where the rate of deamination of 5mC and 5hmC is greater than the rate of conversion of C to U by deamination), or 5hmC-preferring activity, (converts 5hmC to 5hmU by deamination at a rate that is greater than the rate of conversion of C to U and 5mC to T by deamination). The at least one selectivity-enhancing alteration can be a substitution mutation described herein, a deletion described herein, an insertion described herein, or a combination thereof. Examples of selectivity-enhancing alterations include, but are not limited to, (i) a substitution mutation at a position functionally equivalent to D133, (ii) one or more selectivity-enhancing substitution mutations at a position functionally equivalent to amino acids having proximity to the active site, (iii) one or more selectivity-enhancing substitution mutations at a position functionally equivalent to amino acids that are expected to co-evolve with residues 57, 97, 98, 130, 130, 132, and/or 134, (iv) one or more selectivity-enhancing alterations at a position functionally equivalent to amino acids based on the observation that substitution mutations at position 103 in an APOBEC3A protein affect selectivity, and deletion of residues 104-105 is beneficial to stability, (v) one or more selectivity-enhancing alterations in Table 2, and/or (vi) one or more selectivity-enhancing alterations in Table 3. In one embodiment, a substitution mutation or a deletion is at a position functionally equivalent to an amino acid in a member of the APOBEC protein family, including a member of the APOBEC3A subfamily (for instance, SEQ ID NO:3).

[0008] An altered cytidine deaminase that have increased hmC-preferring activity can further include one or more stability enhancing alterations, such as a substitution mutation described herein, a deletion described herein, an insertion described herein, or a combination thereof. Examples of substitution mutations include, but are not limited to, those at a position functionally equivalent to a stability-enhancing mutation selected from Table 4, 5, 7, and 8. Examples of deletions include, but are not limited to, those in Table 6. An altered cytidine deaminase can include at least one substitution mutation and at least one deletion. Examples of combinations of substitution mutations and/or deletions include, but are not limited to, the stability-enhancing alterations in Table 7 and 8. Also included in the present disclosure are polynucleotides encoding an altered cytidine deaminase described herein, compositions that include an altered cytidine deaminase described herein, and methods of using an altered cytidine deaminase described herein.

### BRIEF DESCRIPTION OF THE FIGURES

[0009] The following detailed description of illustrative embodiments of the present disclosure may be best understood when read in conjunction with the following drawings.

[0010] FIG. 1A-C shows the deamination scope of APOBEC3A. Cytosine (C), 5-methylcytosine (5mC), and 5-hydroxymethylcytosine (5hmC) nucleobases in single-stranded DNA are well characterized substrates of APOBEC3A. FIG. 1A shows conversion of C to uracil (U) by APOBEC3A. FIG. 1B shows conversion of 5mC to thymidine (T) by APOBEC3A. FIG. 1C shows conversion of 5hmC to 5-hydroxymethyl uracil (5hmU) by APOBEC3A. “wwwAnos” denotes the connection of the nucleobases to a single-stranded DNA molecule.

[0011] FIG. 1D-H shows the result of treating a DNA sample with a wild-type APOBEC3A enzyme and altered cytidine deaminases. FIG. 1D is an example of treatment with a wild-type APOBEC3A. FIG. 1E is an example of treatment with an 5mC-preferring altered cytidine deaminase described herein. FIG. 1F-H are examples of detection of 5hmC using different altered cytidine deaminases described herein. FIG. 1F is an example of an altered cytidine deaminase that deaminates C and 5mC and does not deaminate 5hmC. FIG. 1G is an example of an altered cytidine deaminase that deaminates 5mC and 5hmC, but does not deaminate C. FIG. 1H is an example of an altered cytidine deaminase that deaminates 5hmC, but does not deaminate C or 5mC. The top strand of FIG. 1D-H shows C, 5mC, and/or 5hmC bases, and the bottom strand of FIG. 1D-H underlines the changed bases. 5mC nucleobases are marked with CH₃, 5hmC nucleobases are marked with CH₂—OH, 5-hydroxymethyl uracil nucleobases are designated with small case “u” and uracil nucleobases are designated with capital “U.”

[0012] FIG. 2 is a schematic showing alignment of cytidine deaminase amino acid sequences using the Clustal O algorithm. An “*” (asterisk) indicates positions which have a single, fully conserved residue between some cytidine deaminases. A “:” (colon) indicates conservation between groups of strongly similar properties as below-roughly equivalent to scoring >0.5 in the Gonnet PAM 250 matrix. A “.” (period) indicates conservation between groups of weakly similar properties as below-roughly equivalent to scoring=<0.5 and >0 in the Gonnet PAM 250 matrix. The amino acids marked with “\hat{ }” show the ZDD motif SEQ ID NO: 12 (e.g., above amino acids 70 to 106 of sp|P31941|1-199). The amino acids marked with “A” and “#” show the ZDD motif SEQ ID NO:13 (e.g., above amino acids 70 to 153 of sp|P31941|1-199). sp|P31941|1-199 is a human APOBEC3A, SEQ ID NO:3; XP_045219544.1 is an APOBEC3A from Macaca fascicularis, SEQ ID NO:19; AER45717.1 is an APOBEC3A from Pongo pygmaeus, SEQ ID NO:20; XP_003264816.1 is an APOBEC3A from Nomascus leucogenys, SEQ ID NO:21; PNI48846.1 is an APOBEC3A from Pan troglodytes, SEQ ID NO:22; and ADO85886.1 is an APOBEC3A from Gorilla gorilla, SEQ ID NO:23.

[0013] FIG. 3 shows deaminase activity of wild-type (NEB APOBEC) and mutant APOBEC variants on substrates including unmodified C, 5mC, and 5hmC. Percent deamination values were determined from a Swal restriction enzyme assay and quantified. C deamination activity was measured in two independent experiments corresponding to the left and right panels.

[0014] FIG. 4 shows a method for 5hmC detection using deaminase-based sequencing.

[0015] FIG. 5 shows the total point mutations that have been tested at each amino acid position of an APOBEC3A (SEQ ID NO:3). Stabilizing mutations (black) denote variants which passed an initial screen to suggest stabilization over the parent construct (representing 20% of all variants tested).

[0016] FIG. 6A-6B show altered cytidine deaminases containing single point mutations in a Y130A/Y132H/C171A background. Proteins were expressed, purified and assessed for stability compared to the parent construct using either a (FIG. 6A) fluorimetry based assay to measure the Tm; or (FIG. 6B) LC/MS based activity assay performed at various temperatures. The optimal reaction temperature is shifted for stabilizing mutations compared to the parent construct, with higher 5mC conversion achieved at higher temperatures.

[0017] FIG. 7A-7B show altered cytidine deaminases containing mutations in a Y130A/Y132H/D133W/R74L/T19Y/C171A (ScE, SEQ ID NO:72) background that were expressed, purified and screened for stability. (FIG. 7A) An LC/MS assay was used to measure the fraction 5mC converted in a DNA oligo after incubation at 45° C. in the presence of denaturants (20% DMSO, 2M betaine). Variants with a higher 5mC conversion than the parent construct (black) were moved forward to screening in a sequencing-based assay. (FIG. 7B) Temperature profile using a sequencing-based assay. 200 nM enzyme was incubated with substrate for 60 min at various temperatures. The optimal reaction temperature is shifted for stabilizing mutations, with higher 5mC conversion achieved at higher temperatures. All data points represent the mean of duplicate measurements.

[0018] FIG. 8 shows melting temperatures for selected constructs. C171A and T19Y confer higher stability in two different backgrounds compared to the parent construct. Stability improvements are additive as mutations are stacked in a Y130A/Y132H/D133W background.

[0019] FIG. 9 shows a temperature profile using a sequencing-based assay. The optimal reaction temperature is shifted for stabilizing mutations, with higher 5mC conversion achieved at higher temperatures.

[0020] FIG. 10 shows substrate selectivity curves of NEB APOBEC and 5mC-selective APOBEC3A mutants. Various 5mC and C % deamination data points of NEB APOBEC and engineered 5mC-selective APOBECs were plotted (X-axis represents 5mC deamination (%); Y-axis represents C deamination (%)). Data points were generated by subjecting the APOBECs to various deamination conditions, such as protein amounts and time points. Scatter plot made up of the data points of respective proteins can be traced forming the selectivity curves. The more the selectivity curve is skewed towards the X-axis, the more 5mC selective it is.

[0021] FIG. 11 shows the architecture of engineered A3A dimers. Several homodimeric and heterodimeric constructs were designed. Two engineered APOBEC3A (A3A) were fused together by a 32 amino acids peptide linker. The homodimers included Y130A/Y132H/D133W, with or without R74L stability mutations. There were 4 heterodimers made up of engineered A3A (Y130A/Y132H/D133W) with and without R74L at the N or C-terminal, and A3A (E72A) at the N or C-terminal. All proteins were expressed with a C terminal His tag.

[0022] FIG. 12A-12D shows engineered A3A dimers that show significant improvement of activity at higher reaction temperature. (FIG. 12A) Deamination activity of each enzyme (0.7 uM) was evaluated in NGS-based quantitative deamination assay at various reaction time and temperature (25, 37, 42 and 50° C.). (FIG. 12B) Fusing the mutants with a linker did not affect their selectivity. Data points show deaminated C (%) plotted against deaminated 5mC (%) generated by the monomers, heterodimers and homodimers. Trendlines generated at respective deamination incubation temperatures (25° C., 37° C., 42° C. and 50° C.) tested were continuous, indicating that the dimers exhibited selectivity comparable to monomeric constructs. (FIG. 12C) At 42° C., 5mC deamination was favored (selectivity curve leaning towards the right and X-axis), compared to 25° C. and 37° C. (FIG. 12D) The engineered homodimer was found to be more active and thermal stable than the monomer. Both monomers and dimers were purified by Ni-NTA affinity, heparin-affinity chromatography and desalted. The heparin purification step resulted in faster enzyme kinetics at 37° C. in both monomer and dimer, but the high reactivity at higher temperature is not observed for the monomer. At 50° C., the monomer had almost no activity, whereas the dimer was able to deaminate up to ˜50% of mC within 15 minutes at 50° C. All these improved performances of the dimer were not observed in monomer even when double amount of monomer is added to the reaction (0.2 μM and 0.4 μM).

[0023] FIG. 13A-13C shows that the R74L/Y130A/Y132H/D133W dimer has improved stability at temperatures between 40° C.-50° C. (FIG. 13A) At y-axis, 5mC to T conversion level in the fully-CpG methylated pUC19 and C to U conversion in non-methylated lambda DNA indicate the true positive and false positive conversion, respectively. On NaOH-treated library, the dimer could withstand higher reaction temperature up to 42° C. without showing reduced enzyme activity, whereas the activity of monomer declined at temperatures above 38° C. When the monomer was supplemented with 10 μM ZnC12, higher reaction temperatures were tolerated, but the effect was not as substantial as in the dimer. For libraries denatured in DMSO, dimer constructs enabled the reaction to withstand temperatures up to 38° C. without showing reduced enzyme activity, whereas the activity of the monomer declined at temperatures above 33° C. This demonstrates that dimerization is enables higher reaction temperatures in multiple reaction formulations. (FIG. 13B) 5mC to T conversion level in both methylated DNA and C to U conversion level in non-methylated DNA are normalized to 1 by its maximum level for in order to compare how temperature affects conversion in methylated and unmethylated DNA. (FIG. 13C) Monomer and homodimer are incubated with the denatured library at various temperatures, the resulted data points were fitted to polynomial regression, and the maximum point of the fitted curve is considered as the temperature at which the enzyme has the highest level of 5mC or C deamination (Tmax). Tmax values are elevated for the monomer with 10 μM Zn added and are even higher for the homodimer.

[0024] FIG. 14 shows that the dimer has improved reaction kinetics compared to monomer. Variation of initial velocity (y-axis) of the reaction at varying amount of DNA substrate (x-axis). Deamination reactions were performed at 45° C., using 1 μM of monomer and 0.5 μM of dimer, to achieve the same equivalent of active sites added in the reaction. Linear rates were measured by incubation of the reactions at 5 nM, 10 nM, 20 nM, 40 nM, 80 nM, 120 nM, 160 nM, 200 nM of DNA substrate for 2 minutes, 5 minutes, 10 minutes, and 15 minutes, followed by heat inactivation at 95° C. for 5 minutes. The reactions were sequenced, and the percentage of conversion converted to nM of product generated, and fitted to linear regression to obtain the velocity.

[0025] FIG. 15 shows activities of dACD having D133V and a dACD D133W. R74L/Y130A/Y132H/D133W dimer and R74L/Y130A/Y132H/D133V dimer purification and temperature activity screening. (FIG. 15A) SDS-PAGE shows expression of engineered dimers, bovine serum albumin (BSA) was used for approximating protein concentration. (FIG. 15B) NGS-based deamination quantification assay on oligo 1 at various temperatures and time points (30 and 60 min). Y-axis represents the % deamination C, 5hmC and 5mC are color coded yellow, green and blue, respectively.

[0026] FIG. 16A-16D shows activities of a dACD having D133V and dACD having D133W. T19Y/R74L/Y130A/Y132H/D133W dimer (blue data points) and T19Y/R74L/Y130A/Y132H/D133V dimer (red data points) selectivity. (FIG. 16A) Percentage C deamination versus 5mC deamination. (FIG. 16B) Percentage 5hmC deamination versus 5mC deamination. (FIG. 16C) Respective time course of C, 5mC, and 5hmC deamination. D) Deamination data at 10 min time point represented as stacked histogram (normalized to total substrate deamination) and side by side histogram (% deamination of each substrate).

[0027] FIG. 17 shows an example of a strategy for 5mC- and 5hmC-based NGS-based single base resolution mapping using differences in the modified C deamination preferences of two dimer ACDs (SEQ ID NO:70 and SEQ ID NO:215).

[0028] FIG. 18 shows an example of a method for fluorescein in situ hybridization in cells and tissues to prove for epigenetic status of a biomarker two-color code to readout C status, DAPI and FAM. Blue-blue (the first sequential readout) is unmodified C, reen-green (the second sequential readout) is 5mC, and blue-green is 5hmC (the third sequential readout). Imaging is invalid in the case of green-blue.

[0029] FIG. 19 shows the sequence of a 101-mer oligonucleotide substrate (SEQ ID NO:60) used in a quantitative NGS-based deamination analysis. 5mC nucleobases are marked with CH₃, 5hmC nucleobases are marked with CH₂—OH. The underlined sequence is the minimal portion of the substrate that contains various modified and unmodified C.

[0030] FIGS. 20A-1, 20A-2, and 20B show deamination activity of 400 altered cytidine deaminases with combinatorial mutations at 130 and 133 positions, in the presence of Y132H mutation and seven stabilizing mutations (R74L, T19Y, C171A, G108A, G188R, G25K, S45W). (FIG. 20A-1, FIG. 20A-2) mutants are grouped by the amino acid residues at position 130 in 20 subplots, where the x-axis indicates the amino acid residues at 133. For each amino acid residues at 130 position in the 20 subplots the results for deamination are shown in the order of C, 5mC, 5hmC. (FIG. 20B) All 20 Y130D mutants showed generally reduced activity, yet some of them showed potentials as 5hmC-specific deaminases, especially Y130D/D133Z where Z=A, G, S, or T (see arrows), in which the percentage of deaminated 5hmC were higher than that of C and mC.

[0031] FIG. 21A-21C shows deamination activities of APOBEC3A mutants carrying a Y130D mutation in combinations with Y132H/R/K and D133A/G/S/T. (FIG. 21A) Y130D variants purified using a KingFisher instrument visualized on SDS-PAGE gel, among which DHG, DHS, DRA failed to be expressed. One microliter of protein was added to 10 μL deamination reaction containing 50 mM Bis Tris pH6.5, 2.5 M betaine and 10 nM of DNA substrate. The temperature of the assay was 37 degrees C. and the KingFisher eluate times were 30 minutes, 2 hours, and 4. APOBEC mutants are labelled as 3-letters which represent the amino acids at 130, 132 and 133 positions, respectively. (FIG. 21B) Deamination activity of the mutants presented in stacked bar charts (normalized to total deamination of C, 5mC and 5hmC), grouped by Y132 and D133 mutations. Each bar lists, from bottom to top, deamination of 5hmC, 5mC, C. (FIG. 21C) Percentage 5hmC deamination versus 5mC deamination. The left panel is an expansion of the right panel X-axis Deaminated mC (%) from 0 to 15%.

[0032] FIG. 22A-22D shows assessment of 5hmC selectivity of Y130D variants using purified protein. (FIG. 22A) Ni-NTA purified and desalted protein visualized on SDS-PAGE, along with Bovine serum albumin (BSA) standards for protein concentration estimation. (FIG. 22B) Experimental parameters of Y130D variants compared against APOBEC3A R74L/Y130A/Y132H/D133V dimer (AHV) which could deaminate both 5hmC and 5mC almost equally. (FIG. 22C) Percentage 5hmC deamination activity is plotted against deaminated 5mC. (FIG. 22D) Percentage 5hmC deamination activity is plotted against deaminated C.

[0033] FIG. 23A to 23P show amino acid sequences of SEQ ID NOs: 16, 17, 37-56, 64-9100, 212-234, and 265.

[0034] Schematic drawings are not necessarily to scale. Like numbers used in the figures refer to like components, steps and the like. However, it will be understood that the use of a number to refer to a component in a given figure is not intended to limit the component in another figure labeled with the same number. In addition, the use of different numbers to refer to components is not intended to indicate that the different numbered components cannot be the same or similar to other numbered components.

### DETAILED DESCRIPTION OF EXEMPLARY EMBODIMENTS

[0035] Terms used herein will be understood to take on their ordinary meaning in the relevant art unless specified otherwise. Several terms used herein and their meanings are set forth below.

[0036] Terms used herein will be understood to take on their ordinary meaning in the relevant art unless specified otherwise. Several terms used herein and their meanings are set forth below.

[0037] As used herein, the terms “organism,” “subject,” are used interchangeably and refer to microbes (e.g., prokaryotic or eukaryotic) animals and plants. An example of an animal is a mammal, such as a human.

[0038] As used herein, the term “target nucleic acid,” is intended as a semantic identifier for the nucleic acid in the context of a method or composition or kit set forth herein and does not necessarily limit the structure or function of the nucleic acid beyond what is otherwise explicitly indicated. Reference to a nucleic acid such as a target nucleic acid includes both single-stranded and double-stranded nucleic acids, and both DNA and RNA, unless indicated otherwise. The term library refers to the collection of target nucleic acids containing known common sequences, such as a universal sequence or adapter, at their 3′ and 5′ ends.

[0039] As used herein, the term “adapter” and its derivatives, e.g., universal adapter, refers generally to any linear oligonucleotide which can be attached to a target nucleic acid. An adapter can be single-stranded or double-stranded DNA, or can include both double-stranded and single-stranded regions. An adapter can include a universal sequence that is substantially identical, or substantially complementary, to at least a portion of a primer, for example a universal primer; an index (also referred to herein as a barcode or tag) to assist with downstream error correction, identification, or sequencing; and/or a unique molecular identifier. In some embodiments, the adapter is substantially non-complementary to the 3′ end or the 5′ end of any target sequence present in the sample. In some embodiments, suitable adapter lengths are in the range of about 6-100 nucleotides, about 12-60 nucleotides, or about 15-50 nucleotides in length. For instance, The terms “adaptor” and “adapter” are used interchangeably.

[0040] As used herein, the term “universal,” when used to describe a nucleotide sequence, refers to a region of sequence that is common to two or more nucleic acid molecules where the molecules also have regions of sequence that differ from each other. A universal sequence that is present in different members of a collection of nucleic acids can be used as, for instance, a “landing pad” in a subsequent step to anneal a nucleotide sequence that can be used as a primer for addition of another nucleotide sequence, such as an index, to a target nucleic acid. A universal sequence that is present in different members of a collection of nucleic acids can allow capture of multiple different nucleic acids using a population of universal capture nucleic acids, e.g., capture oligonucleotides that are complementary to a portion of the universal sequence, e.g., a universal capture sequence. Non-limiting examples of universal capture sequences include sequences that are identical to or complementary to P5 and P7 primers. Similarly, a universal sequence present in different members of a collection of molecules can allow the replication (e.g., sequencing) or amplification of multiple different nucleic acids using a population of universal primers that are complementary to a portion of the universal sequence, e.g., a universal anchor sequence. In one embodiment universal anchor sequences are used as a site to which a universal primer (e.g., a sequencing primer for read 1 or read 2) anneals for sequencing. A capture oligonucleotide or a universal primer therefore includes a sequence that can hybridize specifically to a universal sequence.

[0041] The terms “P5” and “P7” may be used when referring to a universal capture sequence or a capture oligonucleotide. The terms “P5′” (P5 prime) and “P7′” (P7 prime) refer to the complement of P5 and P7, respectively. It will be understood that any suitable universal capture sequence or a capture oligonucleotide can be used in the methods presented herein, and that the use of P5 and P7 are exemplary embodiments only. Uses of capture oligonucleotides such as P5 and P7 or their complements on flow cells are known in the art, as exemplified by the disclosures of WO 2007/010251, WO 2006/064199, WO 2005/065814, WO 2015/106941, WO 1998/044151, and WO 2000/018957, which are incorporated by reference as to P5 and P7 and their uses. For example, any suitable forward amplification primer, whether immobilized or in solution, can be useful in the methods presented herein for hybridization to a complementary sequence and amplification of a sequence. Similarly, any suitable reverse amplification primer, whether immobilized or in solution, can be useful in the methods presented herein for hybridization to a complementary sequence and amplification of a sequence. One of skill in the art will understand how to design and use primer sequences that are suitable for capture and/or amplification of nucleic acids as presented herein.

[0042] As used herein, the term “primer” and its derivatives refer generally to any nucleic acid that can hybridize to a target sequence of interest. Typically, the primer functions as a substrate onto which nucleotides can be polymerized by a polymerase or to which a polynucleotide can be ligated; in some embodiments, however, the primer can become incorporated into the synthesized nucleic acid strand and provide a site to which another primer can hybridize to prime synthesis of a new strand that is complementary to the synthesized nucleic acid molecule. In some embodiments, the primer can be used for hybridization to a predetermined sequence, for instance a predetermined sequence that includes one or more nucleotides that identify the location of a modified cytosine. In one embodiment, a “primer” includes a sequence present in a guide RNA used with a CRISPR-based system to hybridize to a predetermined sequence. The primer can include any combination of nucleotides or analogs thereof. In some embodiments, the primer is a single-stranded oligonucleotide or polynucleotide.

[0043] The terms “polynucleotide” and “oligonucleotide” and “nucleic acid” are used interchangeably herein to refer to a polymeric form of nucleotides of any length, and may include ribonucleotides, deoxyribonucleotides, analogs thereof, or mixtures thereof. The terms should be understood to include, as equivalents, analogs of either DNA, RNA, cDNA, or antibody-oligo conjugates made from nucleotide analogs and to be applicable to single stranded (such as sense or antisense) and double stranded polynucleotides. The term as used herein also encompasses cDNA, that is complementary or copy DNA produced from a RNA template, for example by the action of reverse transcriptase.

[0044] As used herein, an “index” (also referred to as an “index region,” “index adaptor,” “tag,” or a “barcode”) refers to a unique nucleic acid tag that can be used to identify a sample or source of the nucleic acid material, or a compartment in which a target nucleic acid was present. The index can be present in solution or on a solid-support, or attached to or associated with a solid-support and released in solution or compartment. When nucleic acid samples are derived from multiple sources, the nucleic acids in each nucleic acid sample can be tagged with different nucleic acid tags such that the source of the sample can be identified. Any suitable index or set of indexes can be used, as known in the art and as exemplified by the disclosures of U.S. Pat. No. 8,053,192, PCT Publication No. WO 05/068656, and U.S. Pat. Publication No. 2013/0274117. In some embodiments, an index can include a six-base Index 1 (17) sequence, an eight-base Index 1 (i7) sequence, an eight-base Index 2 (i5e) sequence, a ten-base Index 1 (i7) sequence, or a ten-base Index 2 (15) sequence from Illumina, Inc. (San Diego, CA).

[0045] As used herein, the term “amplicon,” when used in reference to a nucleic acid, means the product of copying the nucleic acid, wherein the product has a nucleotide sequence that is the same as or complementary to at least a portion of the nucleotide sequence of the nucleic acid. An amplicon can be produced by any of a variety of amplification methods that use the nucleic acid, or an amplicon thereof, as a template including, for example, polymerase extension, polymerase chain reaction (PCR), rolling circle amplification (RCA), ligation extension, or ligation chain reaction. An amplicon can be a nucleic acid molecule having a single copy of a particular nucleotide sequence (e.g., a PCR product) or multiple copies of the nucleotide sequence (e.g., a concatemeric product of RCA). A first amplicon of a target nucleic acid is typically a complementary copy. Subsequent amplicons are copies that are created, after generation of the first amplicon, from the target nucleic acid or from the first amplicon. A subsequent amplicon can have a sequence that is substantially complementary to the target nucleic acid or substantially identical to the target nucleic acid.

[0046] As used herein, “amplify”, “amplifying” or “amplification reaction” and their derivatives, refer generally to any action or process whereby at least a portion of a nucleic acid molecule is replicated or copied into at least one additional nucleic acid molecule. The additional nucleic acid molecule optionally includes sequence that is substantially identical or substantially complementary to at least some portion of the template nucleic acid molecule. The template nucleic acid molecule can be single-stranded or double-stranded and the additional nucleic acid molecule can independently be single-stranded or double-stranded. Amplification is typically the exponential replication of a nucleic acid molecule. In some embodiments, such amplification can be performed using isothermal conditions; in other embodiments, such amplification can include thermocycling. In some embodiments, the amplification is a multiplex amplification that includes the simultaneous amplification of a plurality of target sequences in a single amplification reaction. In some embodiments, “amplification” includes amplification of at least some portion of DNA and RNA based nucleic acids alone, or in combination. The amplification reaction can include any of the amplification processes known to one of ordinary skill in the art. In some embodiments, the amplification reaction includes polymerase chain reaction (PCR).

[0047] As used herein, the term “polymerase chain reaction” (“PCR”) refers to the method of Mullis U.S. Pat. Nos. 4,683,195 and 4,683,202, which describe a method for increasing the concentration of a segment of a polynucleotide of interest in a mixture of genomic DNA without cloning or purification. This process for amplifying the polynucleotide of interest consists of introducing a large excess of two oligonucleotide primers to the DNA mixture containing the desired polynucleotide of interest, followed by a series of thermal cycling in the presence of a DNA polymerase. The two primers are complementary to their respective strands of the double stranded polynucleotide of interest. The mixture is denatured at a higher temperature first and the primers are then annealed to complementary sequences within the polynucleotide of interest molecule. Following annealing, the primers are extended with a polymerase to form a new pair of complementary strands. The steps of denaturation, primer annealing and polymerase extension can be repeated many times (referred to as thermocycling) to obtain a high concentration of an amplified segment of the desired polynucleotide of interest. The length of the amplified segment of the desired polynucleotide of interest (amplicon) is determined by the relative positions of the primers with respect to each other, and therefore, this length is a controllable parameter. By virtue of repeating the process, the method is referred to as PCR. Because the desired amplified segments of the polynucleotide of interest become the predominant nucleic acid sequences (in terms of concentration) in the mixture, they are said to be “PCR amplified”. In a modification to the method discussed above, the target nucleic acid molecules can be PCR amplified using a plurality of different primer pairs, in some cases, one or more primer pairs per target nucleic acid molecule of interest, thereby forming a multiplex PCR reaction.

[0048] As used herein, “amplification conditions” and its derivatives, generally refers to conditions suitable for amplifying one or more nucleic acid sequences. In some embodiments, the amplification conditions can include isothermal conditions or alternatively can include thermocycling conditions, or a combination of isothermal and thermocycling conditions. In some embodiments, the conditions suitable for amplifying one or more nucleic acid sequences include polymerase chain reaction (PCR) conditions. Typically, the amplification conditions refer to a reaction mixture that is sufficient to amplify nucleic acids such as one or more target sequences flanked by a universal sequence, or target specific primers, or to amplify an amplified target sequence flanked by one or more adapters. Generally, the amplification conditions include a catalyst for amplification or for nucleic acid synthesis, for example a polymerase; a primer that possesses some degree of complementarity to the nucleic acid to be amplified; and nucleotides, such as deoxyribonucleotide triphosphates (dNTPs) to promote extension of the primer once hybridized to the nucleic acid. The amplification conditions can require hybridization or annealing of a primer to a nucleic acid, extension of the primer and a denaturing step in which the extended primer is separated from the nucleic acid sequence undergoing amplification. Typically, but not necessarily, amplification conditions can include thermocycling; in some embodiments, amplification conditions include a plurality of cycles where the steps of annealing, extending and separating are repeated. Typically, the amplification conditions include cations such as Mg²⁺ or Mn²⁺ and can also include various modifiers of ionic strength.

[0049] As defined herein “multiplex amplification” refers to selective and non-random amplification of two or more target sequences within a sample using at least one target-specific primer. In some embodiments, multiplex amplification is performed such that some or all of the target sequences are amplified within a single reaction vessel. The “plexy” or “plex” of a given multiplex amplification refers generally to the number of different target-specific sequences that are amplified during that single multiplex amplification. In some embodiments, the plexy can be about 12-plex, 24-plex, 48-plex, 96-plex, 192-plex, 384-plex, 768-plex, 1536-plex, 3072-plex, 6144-plex or higher. It is also possible to detect the amplified target sequences by several different methodologies (e.g., gel electrophoresis followed by densitometry, quantitation with a bioanalyzer or quantitative PCR, hybridization with a labeled probe; incorporation of biotinylated primers followed by avidin-enzyme conjugate detection; incorporation of 32p-labeled deoxynucleotide triphosphates into the amplified target sequence).

[0050] As used herein, the term “amplification site” refers to a site in or on an array where one or more amplicons can be generated. An amplification site can be further configured to contain, hold or attach at least one amplicon that is generated at the site.

[0051] As used herein, the term “array,” “analyte array,” and “microarray” are used interchangeably and refer to a population of sites that can be differentiated from each other according to relative location. Different molecules that are at different sites of an array can be differentiated from each other according to the locations of the sites in the array. An individual site of an array can include one or more molecules of a particular type. For example, a site can include a single target nucleic acid molecule having a particular sequence or a site can include several nucleic acid molecules having the same sequence (and/or complementary sequence, thereof). The sites of an array can be different features located on the same substrate. Exemplary features include without limitation, droplets, wells in a substrate, beads (or other particles) in or on a substrate, projections from a substrate, ridges on a substrate or channels in a substrate. The sites of an array can be separate substrates each bearing a different molecule. Different molecules attached to separate substrates can be identified according to the locations of the substrates on a surface to which the substrates are associated or according to the locations of the substrates in a liquid or gel. Exemplary arrays in which separate substrates are located on a surface include, without limitation, those having beads in wells.

[0052] As used herein, the term “compartment” is intended to mean an area or volume that separates or isolates something from other things. Exemplary compartments include, but are not limited to, vials, tubes, wells, droplets, boluses, beads, vessels, surface features, flow cell, or areas or volumes separated by physical forces such as fluid flow, magnetism, electrical current or the like. In one embodiment, a compartment is a well of a multi-well plate, such as a 96- or 384-well plate. As used herein, a droplet may include a hydrogel bead, which is a bead for encapsulating one or more nuclei or cell, and includes a hydrogel composition. In some embodiments, the droplet is a homogeneous droplet of hydrogel material or is a hollow droplet having a polymer hydrogel shell. Whether homogenous or hollow, a droplet may be capable of encapsulating one or more nuclei or cells. In some embodiments, the droplet is a surfactant stabilized droplet. In some embodiments, a single cell or Nuclei is present per compartment. In some embodiments, two or more cells or Nuclei are present per compartment. In some embodiments, each compartment contains a compartment-specific index. In some embodiments, the index is in solution or attached or associated with a solid-phase in each compartment.

[0053] The term “flow cell” as used herein refers to a chamber comprising a solid surface across which one or more fluid reagents can be flowed. Examples of flow cells and related fluidic systems and detection platforms that can be readily used in the methods of the present disclosure are described, for example, in Bentley et al., Nature 456:53-59 (2008), WO 04/018497; U.S. Pat. No. 7,057,026; WO 91/06678; WO 07/123744; U.S. Pat. Nos. 7,329,492; 7,211,414; 7,315,019; 7,405,281, and US 2008/0108082.

[0054] As used herein, the term “clonal population” refers to a population of nucleic acids that is homogeneous with respect to a particular nucleotide sequence. The homogenous sequence is typically at least 10 nucleotides long, but can be even longer including for example, at least 50, 100, 250, 500 or 1000 nucleotides long. A clonal population can be derived from a single target nucleic acid or template nucleic acid. Typically, all of the nucleic acids in a clonal population will have the same nucleotide sequence. It will be understood that a small number of mutations (e.g., due to amplification artifacts) can occur in a clonal population without departing from clonality.

[0055] As used herein, a “pattern of cytosine modification,” also referred to as a “methylation profile,” refers to the pattern with which both methylation and unmethylation of cysteines is distributed in the genome of a cell or an organism. A “pattern” is inclusive of both modified cytosines and non-modified cytosines. The pattern can be defined in several distribution dimensions: by organ, by tissue, by status of disease or pathological condition (e.g., cancer, neurophysiological), by genome segment (e.g., chromosome or genetic coordinates on a chromosome), by gene, by CpG island, a group of cytosines, or by the site of a modified cytosine. A pattern of cytosine modification can have a known correlation with a disease or pathological condition, or correlation of a pattern of cytosine modification with a disease or pathological condition can be identified using methods described herein. A pattern of cytosine modification can be present at a specific locus (e.g., location) in a genome, and that specific location can be a single modified cytosine or a set of modified cytosines, e.g., a CpG island. A pattern of cytosine modification can be identified by using a predetermined sequence, e.g., a method of using an altered cytidine deaminase can be designed and practiced with the intent of determining a pattern of cytosine modification, for instance, the methylation status of one of more specific cytosines, the methylation status of one or more specific cytosines present at a specific location of a genome, or the combination thereof.

[0056] As used herein, the term “each,” when used in reference to a collection of items, is intended to identify an individual item in the collection but does not necessarily refer to every item in the collection unless the context clearly dictates otherwise.

[0057] As used in this specification and the appended claims, the term “or” is generally employed in its sense including “and/or” unless the content clearly dictates otherwise. The term “and/or” means one or all of the listed elements or a combination of any two or more of the listed elements. The use of “and/or” in some instances does not imply that the use of “or” in other instances may not mean “and/or.”

[0058] Unless otherwise specified, “a,” “an,” “the,” and “at least one” are used interchangeably and mean one or more than one.

[0059] As used in this specification and the appended claims, the term “or” is generally employed in its sense including “and/or” unless the content clearly dictates otherwise. The term “and/or” means one or all of the listed elements or a combination of any two or more of the listed elements. The use of “and/or” in some instances does not imply that the use of “or” in other instances may not mean “and/or.”

[0060] The words “preferred” and “preferably” refer to embodiments of the disclosure that may afford certain benefits, under certain circumstances. However, other embodiments may also be preferred, under the same or other circumstances. Furthermore, the recitation of one or more preferred embodiments does not imply that other embodiments are not useful, and is not intended to exclude other embodiments from the scope of the disclosure.

[0061] As used herein, “have,” “has,” “having,” “include,” “includes,” “including,” “comprise,” “comprises,” “comprising” or the like are used in their open ended inclusive sense, and generally mean “include, but not limited to,” “includes, but not limited to,” or “including, but not limited to.”

[0062] It is understood that wherever embodiments are described herein with the language “have,” “has,” “having,” “include,” “includes,” “including,” “comprise,” “comprises,” “comprising” and the like, otherwise analogous embodiments described in terms of “consisting of” and/or “consisting essentially of” are also provided. The term “consisting of” means including, and limited to, whatever follows the phrase “consisting of.” That is, “consisting of” indicates that the listed elements are required or mandatory, and that no other elements may be present. The term “consisting essentially of” indicates that any elements listed after the phrase are included, and that other elements than those listed may be included provided that those elements do not interfere with or contribute to the activity or action specified in the disclosure for the listed elements.

[0063] Conditions that are “suitable” for an event to occur, such as converting 5 methylcytosine to thymidine by deamination, or “suitable” conditions are conditions that do not prevent such events from occurring. Thus, these conditions permit, enhance, facilitate, and/or are conducive to the event.

[0064] As used herein, “providing” in the context of a protein, sample of DNA or RNA, or composition means making the protein, sample of DNA or RNA, or composition, purchasing the protein, sample of DNA or RNA, or composition, or otherwise obtaining the protein, sample of DNA or RNA, or composition.

[0065] Reference throughout this specification to “one embodiment,” “an embodiment,” “certain embodiments,” or “some embodiments,” etc., means that a particular feature, configuration, composition, or characteristic described in connection with the embodiment is included in at least one embodiment of the disclosure. Thus, the appearances of such phrases in various places throughout this specification are not necessarily referring to the same embodiment of the disclosure. Furthermore, the particular features, configurations, compositions, or characteristics may be combined in any suitable manner in one or more embodiments.

[0066] While polynucleotide sequences encoding an altered cytidine deaminase are described herein as DNA sequences, it is understood that the complements, reverse sequences, and reverse complements of the DNA sequences can be easily determined by the skilled person. It is also understood that the sequences described herein as DNA sequences can be converted from a DNA sequence to an RNA sequence by replacing each thymidine nucleotide with a uracil nucleotide.

[0067] Throughout this disclosure, various aspects of the disclosure can be presented in a range format. It should be understood that the description in range format is merely for convenience and brevity and should not be construed as an inflexible limitation on the scope of the disclosure. Accordingly, the description of a range should be considered to have specifically disclosed all the possible subranges as well as individual numerical values within that range. For example, description of a range such as from 1 to 6 should be considered to have specifically disclosed subranges such as from 1 to 3, from 1 to 4, from 1 to 5, from 2 to 4, from 2 to 6, from 3 to 6 etc., as well as individual numbers within that range, for example, 1, 2, 2.7, 3, 4, 4.5, 5, 5.3, and 6. This applies regardless of the breadth of the range.

[0068] In the description herein particular embodiments may be described in isolation for clarity. Unless otherwise expressly specified that the features of a particular embodiment are incompatible with the features of another embodiment, certain embodiments can include a combination of compatible features described herein in connection with one or more embodiments.

### Altered Cytidine Deaminases (ACDs)

[0069] Described herein are altered cytidine deaminases (ACDs, or the singular form ACD) and methods for using the ACDs for mapping modified cytosines. In some embodiments, the ACDs are used in one-step, enzymatic methods for mapping modified cytosines, such as 5hmC, at single base resolution. The working examples provided herein describe ACDs based on APOBEC3A, and it is expected that other APOBEC proteins, modified as described herein, can be used.

[0070] Wild type APOBEC3A deaminates cytosine (C), 5 methyl cytosine (5mC), and 5-hydroxymethyl cytosine (5hmC) efficiently in single-stranded DNA (FIG. 1A-C). Treatment of DNA, such as genomic DNA, with wild type APOBEC3A results in the conversion of C to uracil (U), 5mC to thymidine (T), and 5hmC to 5-hydroxyuracil cytosine (5hmU) and reduces the complexity of the DNA for sequencing (FIG. 1D). Point mutations in human APOBEC3A proteins were produced in previous analyses and the ability of the mutant APOBEC3A proteins to convert cytosine to uracil were determined. Modification of the tyrosine residue at position 130 to alanine (Y130A) consistently resulted in an APOBEC protein with no activity (see FIG. 6c of Bulliard et al., 2011, J Virol., 85 (4): 1765-1776, and FIG. 5a of Shi et al., 2017, Nat Struct Mol Biol., 24 (2): 131-139). Proceeding contrary to Bulliard and Shi, it was discovered that certain mutations at position 130 of APOBEC3A alter the enzyme's rate of deamination on 5mC compared to C substrates (International Application Publication WO 2023/196572).

[0071] The cognate tyrosine (Y) at position 130 was individually mutated to all possible canonical amino acid substitutions, including A, C, D, E, F, G, H, I, K, L, M, N, P, Q, R, S, T, V, and W, and evaluated for activity on C and 5mC, and 5hmC substrates (FIG. 2). An APOBEC3A mutant containing a tyrosine to alanine point mutation at position 130 (Y130A) was found to preferentially deaminate 5mC instead of C and 5hmC (5mC was converted to T at a greater rate than C was converted to U and 5hmC was converted to 5hmU). As a result, the treatment of DNA with an ACD of the present disclosure preferentially converts 5mC to T (FIG. 1E). An ACD having this activity is referred to herein as having “5mC-preferring activity,” “cytosine-defective deaminase activity” or “5mC selective deaminase activity”, where the terms are used interchangeably. Analysis of the sample DNA after treatment with the modified cytidine deaminase described herein, for example, by sequencing of the sample DNA, and optional comparison to a reference (e.g., reference sequence) permits easy identification of C to T point mutations, and these point mutations are inferred as 5mC positions.

[0072] A second mutation at Y132 increased the activity of an APOBEC3A mutant containing Y130A to preferentially deaminate 5mC instead of C (5mC was converted to T at a greater rate than C was converted to U) compared to the same APOBEC protein containing one substitution mutation at Y130. In one embodiment, the substitution mutation at the second position is histidine (H), such as a tyrosine to histidine point mutation at position 132 (Y132H).

[0073] Although an engineered APOBEC3A having the point mutations Y130A and Y132H has high selectivity towards 5mC, C deamination can start to occur when 5mC in the reaction mixture is close to completely reacted. For instance, under some conditions an undesirable increase in the deamination of C occurs after approximately 75% of the 5mC in a sample is deaminated (data not shown). In a typical Next Generation Sequencing run, C deamination results in a false positive signal, decreasing the accuracy of 5mC base callout.

[0074] The inventors have discovered that the selectivity of APOBEC3A mutants containing substitution mutations that preferentially deaminate 5mC over C can be further modified to enhance the preference of the enzyme. Modification of the aspartic acid residue at position 133 to tryptophan (D133W) or to cysteine (D133C) in an ACD with enhanced selectivity for 5mC resulted in an ACD with further enhancement of the selectivity for 5mC compared to the same protein without the mutation at D133.

[0075] Also disclosed herein are surprising and unexpected mutations found during screening that alter the selectivity of ACDs. In one example, an APOBEC3A mutant containing a tyrosine to tryptophan point mutation in position 130 (Y130W) maintained the ability to deaminate C and 5mC to U and T, respectively, but lost the ability to deaminate 5hmC. When the sequence of a nucleic acid exposed to this APOBEC3A mutant is determined, C and 5mC are deaminated to U and T, respectively, and are read out as T by a sequencer. On the other hand, 5hmC is not deaminated by the APOBEC3A mutant and is read out as a C (FIG. 1F). This activity is referred to herein as 5hmC-defective deaminase activity and 5hmC-deficient activity. 5fC and 5caC are also not deaminated by this APOBEC3A mutant, and therefore cannot be distinguished from 5hmC. However, the abundance of 5fC and 5caC is orders of magnitude lower than 5hmC in human genomic DNA, approaching the detection limit of mass spectrometers used for such measurements (Ito et al., 2011, Science 333, 1300-1303 (2011); Wagner et al., 2015, Angew. Chem. Int. Edn Engl. 54, 12511-12514 (2015); Bachman et al., 2015, Nat. Chem. Biol. 11, 555-557 (2015)). Therefore, signals from 5fC and 5caC should be insignificant compared to 5hmC.

[0076] In another example, mutation of D133 to valine (D133V) modified the substrate selectivity of an ACD. In particular, a dimerized ACD having a modification of the tyrosine at 130 to alanine (Y130A), a modification of the tyrosine at 132 to histidine (Y132H), and a modification of D133 to valine (D133V) exhibited equal activity on both 5mC and 5hmC (see Examples 14-18). Accordingly, the present disclosure includes an ACD that converts 5hmC to 5hmU and 5mC to T by deamination, where the rate of deamination of 5mC and 5hmC is greater than the rate of conversion of C to U by deamination (FIG. 1G). This activity is referred to herein as “5mC- and 5hmC-preferring activity.”

[0077] The inventors also identified a surprising and unexpected set of mutations at Y130, Y132, and D133 that modified the substrate selectivity of an ACD. In particular, ACDs having a modification of the tyrosine at 130 to aspartic acid (Y130D), a modification of the tyrosine at 132 to histidine, arginine, or lysine (Y132X, wherein X is H, R, or K), and a modification of the aspartic acid at 133 to alanine, glycine, serine, or threonine (D133Z, where Z is A, G, S, or T) exhibited a strong 5hmC preference (see Example 19). Accordingly, the present disclosure includes an ACD that converts 5hmC to 5hmU by deamination at a rate that is greater than the rate of conversion of C to U and 5mC to T by deamination (FIG. 1H). This activity is referred to herein as “5hmC-preferring activity.”

[0078] The introduction of a selectivity-enhancing mutation like D133W was found to reduce the thermal melting point of ACDs that also included a substitution mutation at Y130, at Y132, or at both Y130 and Y132. Reasoning that the multiple introduced substitution mutations weakened protein folding and caused the observed thermal instability, the inventors have discovered that modification of certain amino acids increased stability of APOBEC proteins. Examples of these stability-enhancing modifications are described in Table 4, 5, 6, 7, and 8. For instance, modification of the arginine residue at position 74 to leucine (R74L) in an ACD containing the Y130A/Y132H/D133W mutations resulted in an ACD with increased stability compared to the same protein without the R74L mutation, and retained the enhanced selectivity for 5mC conferred by the D133W substitution mutation. Selectivity-modifying alterations, such as selectivity-enhancing mutations (e.g., D133W and other selectivity-enhancing alterations) and stability-enhancing mutations (e.g., R74L and other stability-enhancing alterations) are described in detail herein and can be combined in combination to provide selectivity-enhanced cytosine deaminases with increased stability.

[0079] Provided herein are altered cytidine deaminases (ACDs), compositions including an ACD, methods of using an ACD, and kits that include an ACD. A cytidine deaminase is considered to be an altered cytidine deaminase (ACD) if it has an activity that selectively deaminates C, 5mC, and/or 5hmC, and includes at least one of the alterations (e.g., substitution mutations, insertions, and/or deletions) described herein. The present disclosure provides multiple types of ACDs. One type of ACD preferentially deaminates 5mC instead of C (i.e., converts 5mC to T at a greater rate than converting C to U) compared to the equivalent wild-type enzyme (has “5mC-preferring activity”). Another type of ACD converts C to U and 5mC to T by deamination where the rate of deamination of C and 5mC is greater than the rate of conversion of 5hmC to 5hmU by deamination (has “5hmC-deficient activity”). The present disclosure provides ACDs that converts 5hmC to 5hmU and 5mC to T by deamination, where the rate of deamination of 5mC and 5hmC is greater than the rate of conversion of C to U by deamination (has “5mC- and 5hmC-preferring activity”). Another type of ACD converts 5hmC to 5hmU by deamination where the rate of deamination of 5hmC is greater than the rate of conversion of C to U and 5mC to T by deamination (has “5hmC-preferring activity.”) Unless the context indicates otherwise, reference to an ACD includes ACDs having 5mC-preferring activity, ACDs having 5hmC-deficient activity, ACDs having 5mC- and 5hmC-preferring activity, and ACDs having 5hmC-preferring activity.

[0080] ACDs include apolipoprotein B mRNA editing enzymes, catalytic polypeptide-like (APOBEC) and activation induced cytidine deaminase (AID). Wild-type APOBEC and AID cytidine deaminases have the activity of deaminating cytidine (C) of DNA and/or RNA to form uridine (U). An ACD of the present disclosure has an altered rate of deamination of C, 5mC, and/or 5hmC when compared to the wild-type enzyme. A cytidine deaminase of the present disclosure can be referred to herein as an “altered cytidine deaminase,” “recombinant cytidine deaminase,” “ACD,” “recombinant ACD,” “mutant cytidine deaminase,” or “modified cytidine deaminase” and refers to any of the engineered ACDs described herein that comprise one or more changes from a reference (i.e., wild-type) amino acid sequence that provide one or more of the activities described herein, including but not limited to an altered deamination profile, e.g., alters its ability to preferentially deaminate one form of cytosine over another, enhanced selectivity for 5mC or C, and/or enhanced stability.

[0081] Whether a protein has cytidine deaminase activity may be determined by in vitro assays. On example of an in vitro assay is based on digestion with the restriction enzyme Swal (see Example 1 of International Application Publication WO 2023/196572). A protein that can deaminate 5mC to thymidine has cytidine deaminase activity.

[0082] An ACD having 5mC-preferring activity can have a catalytic efficiency that is at least 10-fold, at least 50-fold, or at least 100-fold higher on 5mC than C substrates. In one embodiment, an ACD that preferentially deaminates 5mC instead of C can have a catalytic efficiency that is no greater than 1500-fold higher on 5mC than C substrates.

[0083] An ACD having 5hmC-deficient activity, 5mC- and 5hmC-preferring activity, or 5hmC-preferring activity can have a catalytic efficiency that is at least 10-fold, at least 20 fold, at least 30-fold, at least 40-fold, at least 50-fold, or at least 100-fold higher on C than 5mC substrates. In some embodiments, the C-selective ACD has at least 10-fold, 20-fold, 30-fold, 40-fold, 50-fold, 60-fold, 70-fold, 80-fold, 90-fold, 100-fold, 110-fold, 120-fold, 130-fold, 140-fold, 150-fold, 160-fold, 170-fold, 180-fold, 190-fold, 200-fold, 210-fold, 220-fold, 230-fold, 240-fold, 250-fold, 260-fold, 270-fold, 280-fold, 290-fold, 300-fold, 320-fold, 340-fold, 360-fold, 380-fold, 400-fold, 425-fold, 450-fold, 475-fold, 500-fold, 525-fold, 550-fold, 575-fold, 600-fold, 700-fold, 800-fold, 900-fold, 1000-fold higher activity, including ranges and amounts in between. In one embodiment, an ACD can have a catalytic efficiency that is no greater than 1500-fold high activity.

[0084] An ACD having 5mC-preferring deaminase activity can have deamination of C, deamination of 5hmC, or deamination of both C and 5hmC by the ACD reduced by at least 60%, more preferably at least 80%, at least 85%, at least 90%, at least 95%, at least 98% or at least 99% compared to the wild-type cytidine deaminase. In one embodiment, the deamination of C and/or 5hmC by an ACD disclosed herein is undetectable using an assay such as the SwaI-based assay (International Application No. PCT/US2023/017846).

[0085] An ACD having 5hmC-defective deaminase activity can have deamination of 5hmC by the ACD reduced by at least 60%, more preferably at least 80%, at least 85%, at least 90%, at least 95%, at least 98% or at least 99% compared to a wild-type cytidine deaminase, e.g., SEQ ID NO: 3. In one embodiment, the deamination of 5hmC by an ACD disclosed herein is undetectable using an assay such as the SwaI-based assay (International Application No. PCT/US2023/017846).

[0086] An ACD having 5mC- and 5hmC-preferring activity can have deamination C by the ACD reduced by at least 60%, more preferably at least 80%, at least 85%, at least 90%, at least 95%, at least 98% or at least 99% compared to a wild-type cytidine deaminase, e.g., SEQ ID NO: 3. In one embodiment, the deamination of C by an ACD disclosed herein is undetectable using an assay such as the SwaI-based assay (International Application No. PCT/US2023/017846).

[0087] An ACD having 5hmC-preferring activity can have deamination C and deamination of 5mC by the ACD reduced by at least 60%, more preferably at least 80%, at least 85%, at least 90%, at least 95%, at least 98% or at least 99% compared to a wild-type cytidine deaminase, e.g., SEQ ID NO:3. In one embodiment, the deamination C and deamination of 5mC by an ACD disclosed herein are undetectable using an assay such as the SwaI-based assay (International Application No. PCT/US2023/017846).

[0088] In certain embodiments, an ACD of the present disclosure is based on a member of the APOBEC protein family. An ACD of the present disclosure that is “based on” a member of the APOBEC protein family means the ACD is an APOBEC protein that includes one or more of the substitution mutations described herein as compared to a reference APOBEC sequence. An ACD of the present disclosure that is “based on” a member of the APOBEC protein family can also include conservative and/or nonconservative mutations as described herein. The positions of the alterations, substitutions or deletions will be at functionally equivalent amino acids from the APOBEC A3 reference sequence, as described herein.

[0089] The APOBEC protein family includes subfamilies AID, APOBEC1, APOBEC2, APOBEC3 (including 3A, 3B, 3C, 3D, 3F, 3G, 3H), and APOBEC4. An ACD of the present disclosure can be based on a member of the AID subfamily, the APOBEC1 subfamily, the APOBEC2 subfamily, the APOBEC3 subfamily (e.g., the 3A subfamily, the 3B subfamily, the 3C subfamily, the 3D subfamily, the 3F subfamily, the 3G subfamily, or the 3H subfamily), or the APOBEC4 subfamily. An ACD of the present disclosure can be based on a member of the APOBEC protein family from a vertebrate, such as a mammal. Examples of mammals include, but are not limited to, rodents, primates, rabbit, bovine (e.g., cow), porcine (e.g., pig), equine (e.g., horse), elephant, and aardvark. An example of a primate is a human and a chimpanzee.

[0090] The APOBEC protein family is a member of the large cytidine deaminase superfamily that contains a canonical zinc-dependent deaminase (ZDD) signature motif embedded within a core cytidine deaminase fold. This fold includes a five-stranded mixed beta (b)-sheet surrounded by six alpha (a)-helices with the order a1-b1-b2-a2-b3-a3-b4-a4-b5-a5-a6 (Salter et al., Trends Biochem Sci. 2016 41(7): 578-594. Doi: 10.1016/j.tibs.2016.05.001; Salter et al., Trends Biochem. Sci. 2018, 43(8): 606-622 doi.org/10.1016/j.tibs.2018.04.013). Each cytidine deaminase domain core structure of APOBEC proteins contains a highly conserved spatial arrangement of the catalytic center residues of a zinc-binding motif H-[P/A/V]-E-X_{[23}-28]-P—C-X_{[2}-4]-C(SEQ ID NO: 12) (referred to herein as the ZDD motif, where X is any amino acid, and the subscript range of numbers after X refers to the number of amino acids) (Salter et al., Trends Biochem Sci. 2016 41(7): 578-594. Doi: 10.1016/j.tibs.2016.05.001). Without intending to be limited by theory, the H and two C residues coordinate a Zn atom, and the E residue polarizes a water molecule near the Zn-atom for catalysis (Chen et al., 2021, Viruses, 13:497, doi.org/10.3390/v13030497).

[0091] Some members of the APOBEC protein family, e.g., the AID subfamily, the APOBEC1 subfamily, the APOBEC2 subfamily, the APOBEC3A subfamily, the APOBEC3C subfamily, the APOBEC3H subfamily, and the APOBEC4 subfamily, include one copy of the ZDD motif. Other members of the APOBEC protein family, e.g., the APOBEC3B subfamily, the APOBEC3D subfamily, the APOBEC3F subfamily, and the APOBEC3G subfamily, include two copies of the ZDD motif, but often only the C-terminal copy is active (Salter et al., Trends Biochem Sci. 2016 41(7): 578-594. Doi: 10.1016/j.tibs.2016.05.001). Thus, an altered cytidine deaminase disclosed herein includes one or two ZDD motifs. In one embodiment, an altered cytidine deaminase based on a member of the APOBEC3A subfamily that includes the following ZDD motif: HXEX₂₄SW (S/T) PCX_{[2}-4] CX₆FX₈LX₅R (L/I) YX_{[8-11]}LX₂LX_{[10]}M (SEQ ID NO:13) (where X is any amino acid, and the subscript number or range of numbers after X refers to the number of amino acids) (Salter et al., Trends Biochem Sci. 2016 41(7): 578-594. Doi: 10.1016/j.tibs.2016.05.001).

[0092] In one embodiment, an ACD disclosed herein is a member of the APOBEC3 subfamily, e.g., APOBEC3A, APOBEC3B, APOBEC3C, APOBEC3D, APOBEC3F, or APOBEC3G, and can include one or more highly conserved sites that are part of the active site and within the ZDD motif SEQ ID NO:12. The sites include tryptophan at position 98 and serine or threonine at position 99 of SEQ ID NO:3 (Kouno et al., 2017, Nat. Comm, 8:15024, DOI: 10.1038/ncomms15024).

[0093] In addition to the ZDD motif, a member of the APOBEC protein family also includes other highly conserved residues that are part of the active site but not present as part of the ZDD motif SEQ ID NO:12. A member the APOBEC3A subfamily, APOBEC3B subfamily, APOBEC3C subfamily, APOBEC3D subfamily, APOBEC3F subfamily, and APOBEC3G subfamily typically includes one or more of the following highly conserved sites that are part of the active site: arginine at position 28; histidine, asparagine, or arginine at position 29; serine or threonine, preferably threonine, at position 31; asparagine or aspartic acid at position 57; histidine at position 70; cysteine at position 101; cysteine at position 106; tyrosine or phenylalanine at position 130; asparagine or tyrosine at position 131; asparagine, tyrosine, or phenylalanine, preferably tyrosine, at position 132; and arginine or lysine at position 189 of SEQ ID NO: 3 (Kouno et al., 2017, Nat. Comm, 8:15024, DOI: 10.1038/ncomms15024).

[0094] An ACD of the present disclosure includes a substitution mutation, deletion or insertion at one or more residues when compared to a reference cytidine deaminase. A substitution mutation can be at the same position or a functionally equivalent position compared to the reference cytidine deaminase. Reference cytidine deaminases and functionally equivalent positions are described in detail herein. As noted, positions of the altered amino acids described herein and in the tables are in reference to APOBECA3A (SEQ ID NO:3) but one skilled in the art is capable of deriving the functionally equivalent positions in the other referenced cytosine deaminases. The skilled person will readily appreciate that an altered cytidine deaminase described herein is not naturally occurring.

[0095] A reference cytidine deaminase can be a member of the APOBEC protein family. Essentially any known member of the APOBEC protein family can be a reference cytidine deaminase. The skilled person can easily identify members of each of the subfamilies by using a publicly available database such as the Protein database available at the National Center for Biotechnology Information (ncbi.nlm.nih.gov/protein) and searching for APOBEC1, APOBEC2, APOBEC3A, APOBEC3B, APOBEC3C, APOBEC3D, APOBEC3F, APOBEC3G, APOBEC3H, APOBEC4, or, when identifying members of the AID family, Activation-induced cytidine deaminase. A wild-type reference cytidine deaminase has the activity of binding single-stranded DNA (ssDNA) and deaminating a cytosine present on the ssDNA to convert it to uracil. In one embodiment, a wild-type reference cytidine deaminase has the activity of binding single-stranded RNA (ssRNA) and deaminating a cytosine present on the ssRNA to convert it to uracil. Methods for determining whether a protein binds ssDNA or ssRNA and deaminates a cytosine present are known to the skilled person.

[0096] In one embodiment, an ACD has an amino acid sequence that is based on a reference sequence which is a member of the APOBEC protein family includes a ZDD motif H-[P/A/V]-E-X_{[23}-28]-P—C-X_{[2}-4]-C(SEQ ID NO:12) and at least one substitution mutation disclosed herein. Optionally, an altered cytidine deaminase includes other active site residues disclosed herein. Non-limiting examples of reference cytidine deaminase proteins are shown in the Table 1.

TABLE 1
Examples of members of the APOBEC protein subfamilies.

| APOBEC | |
|---|---|
| protein family | Non-limiting examples |
| AID | UniProt: Q9GZX7 (SEQ ID NO: 1); UniProt: G3QLD2 (SEQ ID |
| | NO: 37); Uniprot: Q9WVE0 (SEQ ID NO: 38) |
| APOBEC1 | UniProt: P41238 (SEQ ID NO: 2); NCBI XP_030856728.1 (SEQ ID |
| | NO: 39); Uniprot P51908 (SEQ ID NO: 40) |
| APOBEC2 | UniProt: Q9Y235 (SEQ ID NO: 4); Uniprot G3SGN8 (SEQ ID NO: 41); |
| | Uniprot Q9WV35 (SEQ ID NO: 42) |
| APOBEC3A | UniProt: P31941(SEQ ID NO: 3); GenBank: XP_045219544.1 (SEQ ID |
| | NO: 19) |
| | GenBank: AER45717.1 (SEQ ID NO: 20); GenBank: XP_003264816.1 |
| | (SEQ ID NO: 21); GenBank: PNI48846.1 (SEQ ID NO: 22); GenBank: |
| | ADO85886.1 (SEQ ID NO: 23) |
| APOBEC3B | UniProt: Q9UH17 (SEQ ID NO: 5); Uniprot G3QV16 (SEQ ID NO: 43); |
| | Uniprot F6M3K5 (SEQ ID NO: 44) |
| APOBEC3C | UniProt: Q9NRW3 (SEQ ID NO: 6); Uniprot Q694B5 (SEQ ID NO: 45); |
| | Uniprot B0LW74 (SEQ ID NO: 46) |
| APOBEC3D | UniProt: Q96AK3 (SEQ ID NO: 7); NCBI NP_001332895.1 (SEQ ID |
| | NO: 47); NCBI NP_001332931.1 (SEQ ID NO: 48) |
| APOBEC3F | UniProt: Q8IUX4 (SEQ ID NO: 8); Uniprot G3RD21 (SEQ ID NO: 49); |
| | Uniprot Q1G0Z6 (SEQ ID NO: 50) |
| APOBEC3G | UniProt: Q9HC16 (SEQ ID NO: 9); Uniprot Q694C1 (SEQ ID NO: 51); |
| | Uniprot U5NDB3 (SEQ ID NO: 52) |
| APOBEC3H | UniProt: Q6NTF7 (SEQ ID NO: 10); Uniprot B7T0U7 (SEQ ID |
| | NO: 53); Uniprot Q19Q52 (SEQ ID NO: 54) |
| APOBEC4 | UniProt: Q8WW27(SEQ ID NO: 11); NCBI XP_004028087.1 (SEQ ID |
| | NO: 55); Uniprot Q497M3 (SEQ ID NO: 56) |

UniProt, database of protein sequence and functional information, available at uniprot.org; GenBank, collection of nucleotide sequences and their protein translations, available at ncbi.nlm.nih.gov/protein/.

[0097] In one embodiment, an ACD has an amino acid sequence that is based on a reference sequence that is a member of the APOBEC3A subfamily, and includes a ZDD motif HXEX₂₄SW(S/T)PCX_{[2-4]}CX₆FX₈LX₅R(L/I)YX_{[8-11]}LX₂LX_{[10]}M (SEQ ID NO:13) (where X is any amino acid, and the subscript number or range of numbers after X refers to the number of amino acids) and at least one substitution mutation disclosed herein. In one embodiment, the substitution mutation is a substitution mutation at the underlined tyrosine, such as a substitution mutation to alanine (A) or to tryptophan (W). The underlined tyrosine (Y) of SEQ ID NO:13 is the position functionally equivalent to the tyrosine amino acid 130 of the APOBEC3A protein SEQ ID NO:3. Optionally, the altered cytidine deaminase includes other active site residues disclosed herein.

[0098] In one embodiment, the amino acid sequence of an ACD includes the amino acids of a member of the APOBEC3A subfamily: X_{[16-26]}-GRXXTXLCYXV-X₁₅-GXXXN-X₁₂-HAEXXF-X₁₄-YXXTWXXSWSPC-X_{[2-4]}-CA-X₅-FL-X₇-LXIXXXR(L/I)Y-X₈-GLXXLXXXG-X₅-M-X₄-FXXCWXXFV-X₆-FXPW-X₁₃-LXXI-X_{[2-6]} (SEQ ID NO:14) (where X is any amino acid, and the subscript number or range of numbers after X refers to the number of amino acids), or a subset thereof, and at least one substitution mutation disclosed herein. The underlined tyrosine (Y) of SEQ ID NO:14 is the position functionally equivalent to the tyrosine amino acid 130 of the APOBEC3A protein SEQ ID NO:3. In one embodiment, the substitution mutation is a substitution mutation at the underlined tyrosine, such as a substitution mutation to alanine (A) or to tryptophan (W). Optionally, the altered cytidine deaminase includes other active site residues disclosed herein.

[0099] In one embodiment, the amino acid sequence of an ACD includes the amino acids of a member of the APOBEC3A subfamily: X₂₆-GRXXTXLCYXV-X₁₅-G-X₁₆-HAEXXF-X₁₄-YXXTWXXSWSPC-X₄-CA-X₅-FL-X₇-LXIFXXR(L/I)Y-X₈-GLXXLXXXG-X₅-M-X₄-FXXCWXXFV-X₆-FXPW-X₁₃-LXXI-X₆ (SEQ ID NO:15) (where X is any amino acid, and the subscript number after X refers to the number of amino acids present), or a subset thereof, and at least one substitution mutation disclosed herein. The underlined tyrosine (Y) of SEQ ID NO:15 is the position functionally equivalent to the tyrosine amino acid 130 of the APOBEC3A protein SEQ ID NO:3. In one embodiment, the substitution mutation is a substitution mutation at the underlined tyrosine (Y), such as a substitution mutation to alanine (A) or to tryptophan (W). Optionally, the altered cytidine deaminase includes other active site residues disclosed herein.

[0100] A substitution mutation can be at the same position or a functionally equivalent position compared to a reference cytidine deaminase. By “functionally equivalent” it is meant that the altered cytidine deaminase has the amino acid substitution at the amino acid position in a reference cytidine deaminase that has the same functional role in both the reference cytidine deaminase and the altered cytidine deaminase.

[0101] In general, functionally equivalent substitution mutations in two or more different cytidine deaminases occur at homologous amino acid positions in the amino acid sequences of the cytidine deaminases. Hence, use herein of the term “functionally equivalent” also encompasses mutations that are “positionally equivalent” or “homologous” to a given mutation, regardless of whether or not the particular function of the mutated amino acid is known. It is possible to identify the locations of functionally equivalent and positionally equivalent amino acid residues in the amino acid sequences of two or more different cytidine deaminases on the basis of sequence alignment and/or molecular modelling. An example of a sequence alignment to identify positionally equivalent and/or functionally equivalent residues is set forth in FIG. 2. For example, the residues in the members of the APOBEC3A subfamily in FIG. 2 that are vertically aligned are considered positionally equivalent as well as functionally equivalent to the corresponding residue in the human APOBEC3A amino acid sequence. Thus, for example, as shown in FIG. 2, the tyrosine at residue 130 of the APOBEC3A proteins of Homo sapiens, Pongo pygmaeus, Nomascus leucogenys, Pan troglodytes, and Gorilla gorilla and the tyrosine at residue 133 of the APOBEC3A protein from Macaca fascicularis are functionally equivalent and positionally equivalent. The skilled person can easily identify functionally equivalent residues in cytidine deaminases.

[0102] In one embodiment, an altered cytidine deaminase has an amino acid sequence that is structurally similar to a reference cytidine deaminase disclosed herein. In one embodiment, a reference cytidine deaminase is one that includes the amino acid sequence of a sequence listed in Table 1, SEQ ID NO:14, or SEQ ID NO:15.

[0103] As used herein, an ACD may be “structurally similar” or have “structural similarity” to a reference cytidine deaminase if the amino acid sequence of the ACD possesses a specified amount of sequence similarity and/or sequence identity compared to the reference cytidine deaminase.

[0104] Structural similarity of two amino acid sequences can be determined by aligning the residues of the two sequences (for example, a candidate ACD and a reference cytidine deaminase described herein) to optimize the number of identical amino acids along the lengths of their sequences; gaps in either or both sequences are permitted in making the alignment in order to optimize the number of identical amino acids, although the amino acids in each sequence must nonetheless remain in their proper order. A candidate altered cytidine deaminase is the cytidine deaminase being compared to the reference cytidine deaminase. A candidate ACD that has structural similarity with a reference cytidine deaminase and cytidine deaminase activity is an altered cytidine deaminase.

[0105] Unless modified as otherwise described herein, a pair-wise comparison analysis of amino acid sequences can be conducted, for instance, by the local homology algorithm of Smith & Waterman, Adv. Appl. Math. 2:482 (1981), by the homology alignment algorithm of Needleman & Wunsch, J. Mol. Biol. 48:443 (1970), by the search for similarity method of Pearson & Lipman, Proc. Nat'l. Acad. Sci. USA 85:2444 (1988), by computerized implementations of these algorithms (GAP, BESTFIT, FASTA, and TFASTA in the Wisconsin Genetics Software Package, Genetics Computer Group, 575 Science Dr., Madison, Wis.), or by visual inspection (see generally Current Protocols in Molecular Biology, Ausubel et al., eds., Current Protocols, a joint venture between Greene Publishing Associates, Inc. and John Wiley & Sons, Inc., supplemented through 2004). One example of an algorithm that is suitable for determining structural similarity is the BLAST® algorithm, which is described in Altschul et al., J. Mol. Biol. 215:403-410 (1990). The BLAST® algorithm can be used to calculate percent sequence identity and percent sequence similarity between two sequences. Software for performing BLAST® analyses is publicly available through the National Center for Biotechnology Information.

[0106] In the comparison of two amino acid sequences, structural similarity may be referred to by percent “identity” or may be referred to by percent “similarity.” “Identity” refers to the presence of identical amino acids. “Similarity” refers to the presence of not only identical amino acids but also the presence of conservative substitutions. Thus, in one embodiment the amino acid sequence of a cytidine deaminase protein having sequence similarity to a reference sequence may include conservative substitutions of amino acids present in that reference sequence.

[0107] A conservative substitution for an amino acid in a protein may be selected from other members of the class to which the amino acid belongs. For example, it is well-known in the art of protein biochemistry that an amino acid belonging to a grouping of amino acids having a particular size or characteristic (such as charge, hydrophobicity, or hydrophilicity) can be substituted for another amino acid without altering the activity of a protein, particularly in regions of the protein that are not directly associated with biological activity. For example, amino acids having a non-polar side chain include alanine, glycine, isoleucine, leucine, methionine, phenylalanine, proline, tryptophan, and valine; amino acids having a hydrophobic side chain include glycine, alanine, valine, leucine, isoleucine, proline, phenylalanine, methionine, and tryptophan; amino acids having a polar side chain include arginine, asparagine, aspartic acid, glutamine, glutamic acid, histidine, lysine, serine, cysteine, tyrosine, and threonine; and amino acids having an uncharged side chain include glycine, serine, cysteine, asparagine, glutamine, tyrosine, and threonine.

[0108] Thus, as used herein, reference to a cytidine deaminase as described herein, such as reference to the amino acid sequence of one or more SEQ ID NOs described herein can include a protein having structural similarity to the reference cytidine deaminase, e.g., at least 60%, at least 65%, at least 70%, at least 75%, at least 80%, at least 85%, at least 86%, at least 87%, at least 88%, at least 89%, at least 90%, at least 91%, at least 92%, at least 93%, at least 94%, at least 95%, at least 96%, at least 97%, at least 98%, or at least 99% amino acid sequence similarity to the reference cytidine deaminase. Examples of ACDs having similarity with a reference amino acid sequence includes those having, for instance, at least 60% to at least 99% similarity with (i) SEQ ID NO:3, (ii) SEQ ID NO:16 (iii) SEQ ID NO:17, (iv) SEQ ID NO:69, (v) SEQ ID NO:137 and having a W at amino acid 133, (vi) SEQ ID NO:138 and having an A, G, F, H, Q, M, N, K, V, D, E, S, C, P or T, at amino acid 130, a R, H, K, Q at amino acid 132, and a valine at amino acid 133, and (vii) SEQ ID NO:139 and having an aspartic acid at amino acid 130, and H, R, or K at amino acid 132, and an A, G, S, or T at amino acid 133.

[0109] Alternatively, as used herein, reference to a cytidine deaminase as described herein, such as reference to the amino acid sequence of one or more SEQ ID NOs described herein can include a protein having structural similarity to the reference cytidine deaminase, e.g., at least 60%, at least 65%, at least 70%, at least 75%, at least 80%, at least 85%, at least 86%, at least 87%, at least 88%, at least 89%, at least 90%, at least 91%, at least 92%, at least 93%, at least 94%, at least 95%, at least 96%, at least 97%, at least 98%, or at least 99% amino acid sequence identity to the reference cytidine deaminase. Examples of ACDs having identity with a reference amino acid sequence includes those having, for instance, at least 60% to at least 99% identity with (i) SEQ ID NO:3, (ii) SEQ ID NO:16 (iii) SEQ ID NO:17, (iv) SEQ ID NO:69, (v) SEQ ID NO:137 and having a W at amino acid 133, (vi) SEQ ID NO:138 and having an A, G, F, H, Q, M, N, K, V, D, E, S, C, P or T, at amino acid 130, a R, H, K, Q at amino acid 132, and a valine at amino acid 133, and (vii) SEQ ID NO:139 and having an aspartic acid at amino acid 130, and H, R, or K at amino acid 132, and an A, G, S, or T at amino acid 133.

### Substitution Mutations Conferring Altered Cytidine Deaminase Activity

[0110] An altered cytidine deaminase of the present disclosure can include a substitution mutation at a position functionally equivalent to tyrosine at position 130 (Y130) in a member of the APOBEC protein family, including a member of the APOBEC3A subfamily (for instance, SEQ ID NO:3). In some APOBEC family proteins, the wild-type residue at a position functionally equivalent to Y130 is phenylalanine (F). Accordingly, in some ACDs the residue at a position functionally equivalent to Y130 can be described as (Tyr/Phe)130 or Y/F130. As described herein, substitution mutations at this position can result in an ACD having 5mC-selective deaminase activity, 5hmC-deficient activity, 5mC- and 5hmC-preferring activity, or 5hmC-preferring activity.

[0111] An altered cytidine deaminase of the present disclosure can include a substitution mutation at a position two, three, four, or five amino acids on the C-terminal side of the Y130 position, or functionally equivalent to the Y130 position. In one embodiment, the second mutation is at a position functionally equivalent to tyrosine at position 132 (Y132) in a member of the APOBEC protein family, including a member of the APOBEC3A subfamily (for instance, SEQ ID NO:3). In some embodiments, the substitution mutation at a position two, three, four, or five amino acids on the C-terminal side of the Y130 position, or functionally equivalent to the Y130 position is optionally present with a substitution mutation at a position functionally equivalent to tyrosine at position 130 (Y130). As described herein, a substitution mutation at this position alone or in combination with a substitution mutation at the Y130 position can further enhance the altered activity of an ACD.

[0112] In one embodiment, the substitution mutation at a position functionally equivalent to Y130 increases cytidine deaminase activity and preferentially acts on 5mC compared to cytosine (i.e., has 5mC-selective deaminase activity). The substitution mutation in an ACD is at a position functionally equivalent to position 130 in a member of the APOBEC protein family, including a member of the APOBEC3A subfamily (for instance, SEQ ID NO:3) and can be a mutation to alanine (A), glycine (G), phenylalanine (F), histidine (H), glutamine (Q), methionine (M), asparagine (N), lysine (K), valine (V), aspartic acid (D), glutamic acid (E), serine (S), cysteine (C), proline (P), or threonine (T) (FIG. 3). In one embodiment, the substitution mutation at a position functionally equivalent to Y130 is Y130A (e.g., SEQ ID NO:16). In one embodiment, the substitution mutation at a position functionally equivalent to Y130 is Y130S.

[0113] Optionally, an ACD that has 5mC-preferring activity further includes a second substitution mutation at a position two, three, four, or five amino acids on the C-terminal side of the Y130 position, or functionally equivalent to the Y130 position. In one embodiment, the second mutation is at a position functionally equivalent to tyrosine at position 132 (Y132) in a member of the APOBEC protein family, including a member of the APOBEC3A subfamily (for instance, SEQ ID NO:3). The substitution mutation at the second position can be arginine (R), histidine (H), lysine (K), or glutamine (Q). In one embodiment, the substitution mutation at the second position is histidine, such as Y132 to histidine (Y132H). The double mutant containing both first and second mutations can be any substitution mutation at a position functionally equivalent to Y130 described herein and any second substitution mutation at a position two, three, four, or five amino acids on the C-terminal side of the Y130 position described herein, in any combination. An example of an ACD that preferentially acts on 5mC compared to C has the substitution mutation Y130A/Y132H. Other combinations of substitution mutations at Y130 and/or Y132 in the presence of one or more selection-enhancing mutations, one or more stability-enhancing mutations, or both selection-enhancing stability-enhancing mutations are described herein. In a further embodiment, a 5mC-selecting ACD includes Y130X₁, Y132X₂, and D133X₃ substitution mutations that confer 5mC-selectivity (an increase in 5mC selectivity of at least 50%, at least 75%, at least 80%, at least 85%, at least 90%, or at least 95%). A substitution mutation at D133 is a selectivity-enhancing alteration, and selectivity-enhancing alterations are described herein. In some embodiments, X₁ is selected from A, G, F, H, Q, M, N, K, V, D, E, S, C, P, T, and in one embodiment X₁ is selected from A or S; X₂ is selected from R, H, K, Q, and in one embodiment X₂ is H; and X₃ is selected from W or C, and in one embodiment X₃ is W. Thus, in one embodiment, the 5-mC selective ACD includes Y130A/Y132H/D133W.

[0114] In one embodiment, the substitution mutation at a position functionally equivalent to Y130 results in 5hmC-deficient activity. The substitution mutation in an ACD is at a position functionally equivalent to position 130 in a member of the APOBEC protein family, including a member of the APOBEC3A subfamily (for instance, SEQ ID NO:3) and can be a mutation to tryptophan (W), phenylalanine (F), leucine (L), or alanine (A).

[0115] In one embodiment, the substitution mutation at a position functionally equivalent to D133 results in 5mC- and 5hmC-preferring activity. The substitution mutation in an ACD is at a position functionally equivalent to position 133 in a member of the APOBEC protein family, including a member of the APOBEC3A subfamily (for instance, SEQ ID NO:3) and can be a mutation to valine (V). Examples of ACDs that have 5mC- and 5hmC-preferring activity include Y130A/Y132H/D133V, Y130A/Y132C/D133S, Y130A/Y132H/D133C, Y130A/Y132H/D133E, Y130C/Y132H/D133V, Y130S/Y132H/D133C, Y130S/Y132H/D133E, and Y130T/Y132H/D133V. Additionally or alternatively, ACDs that have 5mC- and 5hmC-preferring activity may have a substitution mutation at a position functionally equivalent to Y130 other than T. For example, an ACD having 5mC- and 5hmC-preferring activity may include Y130T, Y130S, or Y130C, such as Y130T/Y132H/D133V, Y130S/Y132H/D133C, or Y130C/Y132H/D133V. Additionally or alternatively, ACDs that have 5mC- and 5hmC-preferring activity may have a substitution mutation at a position functionally equivalent to D133 other than V. For example, an ACD having 5mC- and 5hmC-preferring activity may include Y130A/Y132H/D133C, Y130A/Y132H/D133E, Y130S/Y132H/D133C, or Y130S/Y132H/D122E.

[0116] In one embodiment, substitution mutations at a position functionally equivalent to Y130, Y132, and D133 results in 5hmC-preferring activity. An ACD having 5hmC-preferring activity includes a substitution mutation of the tyrosine at 130 to aspartic acid (Y130D), a substitution mutation of the tyrosine at 132 to histidine, arginine, or lysine (Y132X, where X is H, R, or K), and a substitution mutation of the aspartic acid at 133 to alanine, glycine, serine, or threonine (D133Z, where Z is A, G, S, or T). Thus, 5-hmC-preferring ACD can be described as including Y130D/Y132X/D133Z, where X is H, R, or K, and Z is A, G, S, or T. Specific examples of 5-hmC-preferring ACDs include Y130D/Y132H/D133A, Y130D/Y132H/D133T, Y130D/Y132K/D133S, Y130D/Y132K/D133T, or Y130D/Y132R/D133S. Examples of 5hmC-preferring ACDs include SEQ ID NOs:101-109, 120, 127, and 129-136.

[0117] An ACD having substitution mutations that confer 5mC-selective deaminase activity, 5hmC-deficient activity, 5mC- and 5hmC-preferring activity, or 5hmC-preferring activity can further include one or more, two or more, three or more, four or more, five or more, six or more, seven or more, eight or more, nine or more, or ten or more of the stability-enhancing alterations described herein.

### Substitution Mutations Conferring Increased Selectivity or Stability

[0118] An ACD of the present disclosure can include at least one alteration, e.g., one or more substitution mutation, one or more deletion, and/or one or more insertion, that enhances selectivity or stability of an ACD. In some embodiments, the alteration may enhance both selectivity and stability of an ACD.

### Selectivity

[0119] An ACD having an alteration that enhances selectivity can be one that has substitution mutations that confer 5mC-selective deaminase activity, 5hmC-deficient activity, 5mC- and 5hmC-preferring activity, or 5hmC-preferring activity. Thus, one or more alterations that enhances selectivity can be present in an ACD having 5mC-selective deaminase activity (e.g., having a substitution mutation at a position functionally equivalent to Y130 where the substitution is to A, G, F, H, Q, M, N, K, V, D, E, S, C, P or T; a substitution mutation at a position functionally equivalent to Y132 where the substitution is to R, H, K, Q; or substitution mutations at positions functionally equivalent to Y130 and to Y132.

[0120] One or more alterations that enhances selectivity can be present in an ACD having 5hmC-deficient activity (e.g., having a substitution mutation at a position functionally equivalent to Y130 where the substitution is to W. One example of such an ACD is SEQ ID NO:59.

[0121] One or more alterations that enhances selectivity can be present in an ACD having 5mC- and 5hmC-preferring activity (e.g., having a substitution mutation at a position functionally equivalent to Y130 where the substitution is to A, a substitution mutation at a position functionally equivalent to Y132 where the substitution is to H, and a substitution mutation at a position functionally equivalent to Y133 where the substitution is to V). Examples of such ACDs include SEQ ID NOs:119, 126, 213-215, and 271-284.

[0122] One or more alterations that enhances selectivity can be present in an ACD having 5hmC-preferring activity (e.g., having a substitution mutation at a position functionally equivalent to Y130 where the substitution is to D; a substitution mutation at a position functionally equivalent Y132 where the substitution is to H, R, or K; and a substitution mutation at a position functionally equivalent to D133 where the substitution is to A, G, S, or T. Thus, in some embodiments, 5hmC-preferring ACD include, but are not limited to, e.g., Y130D/Y132H/D133A; Y130D/Y132H/D133G; Y130D/Y132H/D133S; Y130D/Y132H/D133T; Y130D/Y132R/D133A; Y130D/Y132R/D133G; Y130D/Y132R/D133S; Y130D/Y132R/D133T; Y130D/Y132K/D133A; Y130D/Y132K/D133G; Y130D/Y132K/D133S; or Y130D/Y132K/D133T.

[0123] A selectivity-enhancing alteration can be (i) a substitution mutation at a position functionally equivalent to an amino acid, a deletion, or an insertion, (ii) a substitution mutation in combination with one or more deletions and one or more insertions, (iii) combinations of more than one selectivity-enhancing substitution mutation in combination with one or more deletion, one or more insertion, or in combination with both one or more deletion and one or more insertion. A selectivity-enhancing alteration is considered to enhance the selectivity of an ACD for its substrate (e.g., greater selectivity of 5mC for an ACD having 5mC-preferring activity, greater selectivity of C and 5mC for an ACD having 5hmC-deficient activity, greater selectivity of 5mC and 5hmC for an ACD having 5mC- and 5hmC-preferring activity, and greater selectivity of 5hmC for an ACD having 5hmC-preferring activity) when compared to the same ACD that does not have the selectivity-enhancing alteration.

[0124] The locations of selectivity-enhancing alterations have been identified and the specific alterations predicted using various approaches. In one embodiment, a substitution mutation that is a selectivity-enhancing alteration for an ACD having 5mC-preferring activity is at a position functionally equivalent to the aspartic acid at position 133 (D133) in a member of the APOBEC protein family, including a member of the APOBEC3A subfamily (for instance, SEQ ID NO:3). The substitution mutation at D133 can be to any amino acid, and in one embodiment is to W (D133W) or C (D133C). For instance, the protein can include, in addition to a substitution mutation at a position functionally equivalent to D133, a substitution mutation at a position functionally equivalent to Y130 and optionally a substitution mutation at a position functionally equivalent to Y132. The substitution mutation at a position functionally equivalent to Y130 can be a mutation to A, G, F, H, Q, M, N, K, V, D, E, S, C, P or T, and in exemplary embodiments is A or S. The optional substitution mutation at a position functionally equivalent to Y132 can be a mutation to R, H, K, Q, and in one exemplary embodiment is H. Specific examples of an ACD that has enhanced selectivity for 5mC are Y130A/D133X, Y130S/D133X, Y130A/Y132H/D133X, and Y130S/Y132H/D133X, where X is any amino acid other than D, and in some embodiments X is W or C.

[0125] An ACD that preferentially deaminates 5mC instead of C can have one or more selectivity-enhancing substitution mutations at a position functionally equivalent to amino acids having proximity to the active site. Examples of this type of selectivity-enhancing substitution mutations are the following: the histidine at position 29 (H29), the lysine at position 30 (K30), the threonine at position 31 (T31), the tryptophane at position 98 (W98), the serine at position 99 (S99), the proline at position 100 (P100), the phenylalanine at position 102 (F102), the serine at position 103 (S103), the tryptophan at position 104 (W104), the glycine at position 105 (G105), the tyrosine at position 130 (Y130), the aspartic acid at position 131 (D131), the tyrosine at position 132 (Y132), the aspartic acid at position 133 (D133), or the proline at position 134 (P134), in a member of the APOBEC protein family, including a member of the APOBEC3A subfamily (for instance, SEQ ID NO:3). The substitution mutation can result in changing the wild-type residue (e.g., H29, K30, etc.) to any of the other 19 amino acids. In one embodiment, the ACD can include a deletion of amino acids at positions functionally equivalent to amino acids 104 and 105 (AW104-G105). For instance, an ACD can include, in addition to one or more substitution mutations at a position functionally equivalent to amino acids having proximity to the active site, a substitution mutation at a position functionally equivalent to Y130 and optionally a substitution mutation at a position functionally equivalent to Y132. The substitution mutation at a position functionally equivalent to Y130 can be a mutation to A, G, F, H, Q, M, N, K, V, D, E, S, C, P or T, and in exemplary embodiments is A or S. The optional substitution mutation at a position functionally equivalent to Y132 can be a mutation to R, H, K, Q, and in one exemplary embodiment is H. If present, the mutation at D133 can be W or C. Thus, an ACD can have one, two, three, four, five, six, seven, eight, nine, 10, or all 11 of the selectivity-enhancing substitution mutations, in any combination. An ACD can have one, two, three, four, five, six, seven, eight, nine, 10, or all 11 of the selectivity-enhancing substitution mutations, in any combination, with any other selectivity-enhancing alteration described herein. Optionally, the ACD can further include one or more of the stability-enhancing substitution mutations described herein.

[0126] An ACD that preferentially deaminates 5mC instead of C can have one or more selectivity-enhancing substitution mutations at a position functionally equivalent to amino acids that are expected to co-evolve with residues 57, 97, 98, 130, 132, and/or 134. One example of this type of selectivity-enhancing substitution mutation is one or more substitution mutations at positions functionally equivalent to the serine at position 97 (S97), the isoleucine at position 124 (I124), the arginine at position 128 (R128), the isoleucine at position 129 (I129), and the threonine at position 152 (T152) in a member of the APOBEC protein family, including a member of the APOBEC3A subfamily (for instance, SEQ ID NO:3). Another example is one or more substitution mutations at positions functionally equivalent to the asparagine at position 57 (N57), the arginine at position 74 (R74), the phenylalanine at position 75 (F75), the leucine at position 78 (L78), the phenylalanine at position 158 (F158), and the tryptophane at position 162 (W162). A third example is one or more substitution mutations at positions functionally equivalent to the phenylalanine at position 125 (F125), the alanine at position 126 (A126), the alanine at position 127 (A127), the proline at position 134 (P134), and the tyrosine at position 136 (Y136) in a member of the APOBEC protein family, including a member of the APOBEC3A subfamily (for instance, SEQ ID NO:3). The substitution mutation can result in changing the wild-type residue (e.g., S97, 1124, etc.) to any of the other 19 amino acids. For instance, an ACD can include, in addition to one or more substitution mutations at a position functionally equivalent to amino acids that are expected to co-evolve with residues 57, 97, 98, 130, 132, and/or 134, a substitution mutation at a position functionally equivalent to Y130 and optionally a substitution mutation at a position functionally equivalent to Y132. The substitution mutation at a position functionally equivalent to Y130 can be a mutation to A, G, F, H, Q, M, N, K, V, D, E, S, C, P or T, and in exemplary embodiments is A or S. The optional substitution mutation at a position functionally equivalent to Y132 can be a mutation to R, H, K, Q, and in one exemplary embodiment is H. If present, the mutation at D133 can be W or C. Optionally, an ACD having one or more of these alterations can further include one or more of any of the other selectivity-enhancing alterations described herein. Optionally, the ACD can further include one or more of the stability-enhancing substitution mutations described herein.

[0127] An ACD that preferentially deaminates 5mC instead of C can have one or more selectivity-enhancing alterations at a position functionally equivalent to amino acids based on the observation that substitution mutations at position 103 in an APOBEC3A protein affect selectivity, and deletion of residues 104-105 was beneficial to both stability and to activity. One example of this type of selectivity-enhancing alteration is a substitution mutation at a position functionally equivalent to the serine at position 103 (S103) in a member of the APOBEC protein family, including a member of the APOBEC3A subfamily (for instance, SEQ ID NO:3). Another example of this type of selectivity-enhancing alteration is a substitution mutation at a position functionally equivalent to the serine at position 103 (S103) and a deletion of the amino acids at positions functionally equivalent to the tryptophane and glycine at positions 104 and 105, respectively (W104, G105) in a member of the APOBEC protein family, including a member of the APOBEC3A subfamily (for instance, SEQ ID NO:3). For instance, an ACD can include, in addition to one or more substitution mutations at a position functionally equivalent to amino acids at positions 103-105, a substitution mutation at a position functionally equivalent to Y130 and optionally a substitution mutation at a position functionally equivalent to Y132. The substitution mutation at a position functionally equivalent to Y130 can be a mutation to A, G, F, H, Q, M, N, K, V, D, E, S, C, P or T, and in exemplary embodiments is A or S. The optional substitution mutation at a position functionally equivalent to Y132 can be a mutation to R, H, K, Q, and in one exemplary embodiment is H. If present, the mutation at D133 can be W or C. Optionally, an ACD having one or more of these alterations can further include one or more of any of the other selectivity-enhancing alterations described herein. Optionally, the ACD can further include one or more of the stability-enhancing substitution mutations described herein.

[0128] An ACD that preferentially deaminates 5mC instead of C can have one or more selectivity-enhancing alterations at a position functionally equivalent to amino acids expected to increase selectivity based on molecular dynamics analysis (see Example 6). Specific examples of substitution mutations identified in different scaffolds as likely to increase selectivity of an ACD are shown in Table 2. For instance, an ACD can include, in addition to one or more substitution mutations at a position functionally equivalent to amino acids expected to increase selectivity based on molecular dynamics analysis, a substitution mutation at a position functionally equivalent to Y130 and optionally a substitution mutation at a position functionally equivalent to Y132. The substitution mutation at a position functionally equivalent to Y130 can be a mutation to A, G, F, H, Q, M, N, K, V, D, E, S, C, P or T, and in exemplary embodiments is A or S. The optional substitution mutation at a position functionally equivalent to Y132 can be a mutation to R, H, K, Q, and in one exemplary embodiment is H. If present, the mutation at D133 can be W or C.

TABLE 2
Selectivity-enhancing alterations
identified by molecular dynamics analysis.
Substitution mutations and deletions
tested at the position¹

| | | |
|---|---|---|
| A107V | R111F | E109K/R111A/Y136I/ |
| | | A139G |
| A107L | Y136A | A112E/E138A |
| A107S | Y136E | A112E/A139G |
| A107T | Y136Q | A112E/M142R |
| A107F | Y136L | A112E/E138A/A139G/ |
| | | M142R |
| A107Y | Y136F | R144H |
| A107F/F102K/ | Y136E/I193D | R111A |
| I193D | | |
| F102K/I193D | F102A/Δ103-104 | K137Q |
| I193D | F102A/G105A | Q141R/D145R |
| L194D | F102A/Δ103-104/ | Q141R/R144H |
| | G105A | |
| A139V | F102Y/G105D | M142R/D145R |
| A139F | F102Y/G105D/C108R | Δ104-105/A107V |
| A139S | F102A/V110L | Δ104-105/A107L |
| A139T | F102A/R111A | Δ104-105/A107S |
| A139Y | G105A/E109K | Δ104-105/A107T |
| A139G | G105D/M142R | Δ104-105/A107F |
| N57D | A107S/F102A | Δ104-105/A107Y |
| Q58E | A107S/G105N | Δ104-105/A107F/ |
| | | F102K/I193D |
| E109K | A107S/E109R | Δ104-105/A139V |
| E109H | A107S/V110L | Δ104-105/A139F |
| E109L | A107S/A112Q | Δ104-105/A139S |
| E109F | A107S/Q115S | Δ104-105/A139T |
| E109Q | A107S/Y136E | Δ104-105/A139Y |
| E109A | A107S/R144K | Δ104-105/A139G |
| A112E | E109K/V110L/R111A/ | Δ104-105/F102A/G105A |
| | A112E | |
| A112Q | E109K/R111A/A112E | Δ104-105/F102Y/ |
| | | G105D/C108R |
| A112K | E109K/Y136I | Δ104-105/A107S/F102A |
| A112L | E109K/A139G | Δ104-105/E109K/A139G |
| R111T | R111A/A139G | Δ104-105/R111A/A139G |

¹Position of the substitution mutation and the identity of the substitution mutation/position of deletions tested at the position. Each substitution mutation was tested as described in Example 6 in the scaffold Y130A/Y132H/D133W/R74L/T19Y/C171A/G108C/G188R/G25K/S45W/I17T/A59P/K60R/Δ61-68 (SEQ ID NO: 75, ScK).

[0129] Optionally, an ACD can have one or more of the of the selectivity-enhancing alterations in Table 2, in any combination, with any other selectivity-enhancing alteration described herein. Optionally, the ACD can further include one or more of the stability-enhancing substitution mutations described herein.

[0130] An ACD that preferentially deaminates 5mC instead of C can have one or more selectivity-enhancing alterations at a position functionally equivalent to amino acids expected to increase selectivity based on analysis to make more space in the binding pocket of a cytidine deaminase or ACD for 5mC (see Example 7). Typically, the addition of space was by insertion of one or more amino acids. Specific examples of substitution alterations identified as likely to increase selectivity of an ACD are shown in Table 3. For instance, an ACD can include, in addition to one or more substitution mutations at a position functionally equivalent to amino acids expected to increase selectivity based on analysis to make more space in the binding pocket, a substitution mutation at a position functionally equivalent to Y130 and optionally a substitution mutation at a position functionally equivalent to Y132. The substitution mutation at a position functionally equivalent to Y130 can be a mutation to A, G, F, H, Q, M, N, K, V, D, E, S, C, P or T, and in exemplary embodiments is A or S. The optional substitution mutation at a position functionally equivalent to Y132 can be a mutation to R, H, K, Q, and in one exemplary embodiment is H. The mutation at D133 can be W or C. If present, the mutation at D133 can be W or C.

TABLE 3
Selectivity-enhancing substitution alterations.

| | 5mC |
|---|---|
| i. Substitution alteration¹ | selectivity |
| Σ25-26: P_K25G | + |
| Σ25-26: P_K25D | |
| Σ25-26: P_K25E | |
| Σ25-26: P_K25R | |
| Σ25-26: P | |
| Σ25-26: P_K25D_I26L | |
| Σ25-26: P_K25E_I26L | |
| Σ25-26: P_K25R_I26L | |
| Σ25-26: P_I26L | |
| Σ25-26: S_K25G | + |
| Σ25-26: S_K25D | |
| Σ25-26: S | |
| Σ25-26: I_K25G | |
| Σ25-26: I_K25E | |
| Σ25-26: I | |
| Σ25-26: S_K25G_I26L | |
| Σ25-26: S_K25D_I26L | |
| Σ25-26: S_I26L | |
| Σ25-26: I_K25G_I26Y | |
| Σ25-26: I_K25E_I26Y | |
| Σ25-26: I_I26Y | |
| Σ25-26: V_K25G | |
| Σ25-26: V_K25D | |
| Σ25-26: V | |
| Σ25-26: V_K25G_I26L | |
| Σ25-26: V_K25D_I26L | |
| Σ25-26: V_I26L | |
| Σ25-26: A | + |
| Σ25-26: VEY_K25G | |
| Σ25-26: VEY_K25S | |
| Σ25-26: VEY | |
| Σ25-26: AAA | |
| Σ130-131: Y | |
| Σ130-131: Y_D131H | |
| Σ130-131: Y_D131F | |
| Σ130-131: Y_D131H_H132W | |
| Σ130-131: Y_D131F_H132W | |
| Σ130-131: Y_D131H_H132W_W133D_L135H | |
| Σ130-131: Y_D131F_H132W_W133D_L135H | |
| Σ130-131: Y_A130Y_D131H_H132W_W133D_L135H | |
| Σ130-131: Y_A130Y_D131F_H132W_W133D_L135H | |
| Σ130-131: A | |
| Σ131-132: F | |
| Σ131-132: F_D131Y_H132W_W133D | |
| Σ131-132: F_D131Y_H132W_W133D_L135D | |
| Σ131-132: F_A130Y_D131Y_H132W_W133D_L135D | |
| Σ131-132: A | |
| Σ132-133: E | |
| Σ132-133: E_W133E | |
| Σ132-133: E_H132W_W133E | |
| Σ132-133: E_D131M_H132W_W133E | |
| Σ132-133: E_D131M_H132W_W133E_L135E | |
| Σ132-133: E_A130F_D131M_H132W_W133E_L135E | |
| Σ132-133: A | |
| Σ134-135: K | |
| Σ134-135: K_L135A | |
| Σ134-135: K_P134D_L135A | |
| Σ134-135: K_W133E_P134D_L135A | |
| Σ134-135: K_H132C_W133E_P134D_L135A | |
| Σ134-135: K_D131F_H132C_W133E_P134D_L135A | |
| Σ134- | |
| 135: K_A130Y_D131F_H132C_W133E_P134D_L135A | |
| Σ134-135: A | |
| Σ132-133: W | |
| Σ132-133: W_W133E | |
| Σ26-27: A | |
| Σ27-28: A | |
| Σ28-29: A | + |
| Σ29-30: A | |
| Σ30-31: A | |
| Σ31-32: A | |
| Σ32-33: A | |
| Σ95-96: A | |
| Σ96-97: A | |
| Σ97-98: A | |
| Σ98-99: A | |
| Σ99-100: A | |
| Σ100-101: A | |
| Σ101-102: A | |
| Σ102-103: A | |
| Σ103-104: A | |
| Σ104-105: A | |
| Σ127-128: A | |
| Σ128-129: A | |
| Σ133-134: A | |
| Σ135-136: A | |
| Σ136-137: A | |
| Σ137-138: A | |
| Σ138-139: A | |
| Σ25-26: A | |
| Σ25-26: C | |
| Σ25-26: D | |
| Σ25-26: E | |
| Σ25-26: F | |
| Σ25-26: G | |
| Σ25-26: H | |
| Σ25-26: I | |
| Σ25-26: K | + |
| Σ25-26: L | |
| Σ25-26: M | |
| Σ25-26: N | |
| Σ25-26: P | |
| Σ25-26: Q | |
| Σ25-26: R | |
| Σ25-26: S | |
| Σ25-26: T | |
| Σ25-26: V | |
| Σ25-26: W | |
| Σ25-26: Y | |
| Σ28-29: A | |
| Σ28-29: C | |
| Σ28-29: D | |
| Σ28-29: E | |
| Σ28-29: F | |
| Σ28-29: G | |
| Σ28-29: H | |
| Σ28-29: I | |
| Σ28-29: K | |
| Σ28-29: L | |
| Σ28-29: M | |
| Σ28-29: N | |
| Σ28-29: P | |
| Σ28-29: Q | |
| Σ28-29: R | |
| Σ28-29: S | |
| Σ28-29: T | + |
| Σ28-29: V | |
| Σ28-29: W | |
| Σ28-29: Y | |
| Σ103-104: A | |
| Σ103-104: C | |
| Σ103-104: D | |
| Σ103-104: E | |
| Σ103-104: F | |
| Σ103-104: G | |
| Σ103-104: H | |
| Σ103-104: I | |
| Σ103-104: K | |
| Σ103-104: L | |
| Σ103-104: M | |
| Σ103-104: N | |
| Σ103-104: P | + |
| Σ103-104: Q | |
| Σ103-104: R | |
| Σ103-104: S | |
| Σ103-104: T | |
| Σ103-104: V | |
| Σ103-104: W | |
| Σ103-104: Y | |
| Σ104-105: A | |
| Σ104-105: C | |
| Σ104-105: D | |
| Σ104-105: E | |
| Σ104-105: F | |
| Σ104-105: G | |
| Σ104-105: H | |
| Σ104-105: I | |
| Σ104-105: K | |
| Σ104-105: L | |
| Σ104-105: M | |
| Σ104-105: N | |
| Σ104-105: P | |
| Σ104-105: Q | |
| Σ104-105: R | |
| Σ104-105: S | |
| Σ104-105: T | |
| Σ104-105: V | |
| Σ104-105: W_W104G/G105W | |
| Σ104-105: Y | |

¹Position of the substitution alteration and the identity of the insertion and/or substitution mutation tested at the position. Insertions are named with an “Σ”, followed by the two residues that flank the insertion and the amino acid inserted. For instance, Σ25-26: P_K25G means a proline (P) amino acid was inserted between the amino acids at positions 25 and 26. The substitution alterations are tested in the scaffold Y130A/Y132H/D133W/R74L/T19Y/C171A/G108C/G188R/G25K/S45W/I17T/A59P/K60R/Δ61-68 (SEQ ID NO: 75, ScK). In some constructs one or more substitution mutation present in ScK are modified by substitution mutation, For instance, the scaffold K (SEQ ID NO: 75) carries the G25K mutation, but in the mutant Σ25-26: P_K25G, G25K was reverted back to G.
+ means 5mC selectivity was observed.

[0131] Exemplary substitution alterations include Σ25-26:P_K25G, Σ25-26:A, Σ25-26:S_K25G, Σ28-29:A, Σ104-105: P, Σ28-29: T, Σ25-26: K, and W104C. For instance, an ACD can include, in addition to one or more alterations of Table 3, a substitution mutation at a position functionally equivalent to Y130 and optionally a substitution mutation at a position functionally equivalent to Y132. The substitution mutation at a position functionally equivalent to Y130 can be a mutation to A, G, F, H, Q, M, N, K, V, D, E, S, C, P or T, and in exemplary embodiments is A or S. The optional substitution mutation at a position functionally equivalent to Y132 can be a mutation to R, K, L, Q, and in one exemplary embodiment is H. If present, the mutation at D133 can be W or C. Optionally an ACD can have one or more of the selectivity-enhancing alterations in Table 3, in any combination, with any other selectivity-enhancing alteration described herein. Optionally, the ACD can further include one or more of the stability-enhancing substitution mutations described herein.

[0132] In one embodiment, an ACD having wild-type activity can have more than one selectivity-enhancing alterations described herein. The selectivity-enhancing alterations can be (i) a substitution mutation at a position functionally equivalent to D133, (ii) one or more selectivity-enhancing substitution mutations at a position functionally equivalent to amino acids having proximity to the active site as described herein, (iii) one or more selectivity-enhancing substitution mutations at a position functionally equivalent to amino acids that are expected to co-evolve with residues 57, 97, 98, 130, 130, 132, and/or 134, (iv) one or more selectivity-enhancing alterations at a position functionally equivalent to amino acids based on the observation that substitution mutations at position 103 in an APOBEC3A protein affect selectivity, and deletion of residues 104-105 is beneficial to stability, (v) one or more selectivity-enhancing alterations in Table 2, and/or (vi) one or more selectivity-enhancing alterations in Table 3. In one embodiment, a substitution mutation or a deletion is at a position functionally equivalent to an amino acid in a member of the APOBEC protein family, including a member of the APOBEC3A subfamily (for instance, SEQ ID NO:3).

### Stability

[0133] Experiments to identify stability-enhancing substitution alterations were initiated to address the reduced stability observed with some selectivity-enhancing alterations (e.g., the Y130/Y132/D133 triple mutation). In some embodiments, the stability-enhancing substitution alterations increase the thermal melting point of an ACD. Increased temperature optimums are highly desirable because it decreases DNA secondary structures by opening reaction sites that would be otherwise inaccessible due to secondary structure resulting in decreased false positive rate; stabilizes the enzyme in reaction conditions, which permits longer incubations and increased conversion; increases reaction kinetics, which allows for more tightly controlled conditions; and improved characteristics for commercialization, including increased shelf life, robustness in the assay, manufacturability, etc.

[0134] The stability-enhancing alterations described herein were identified in an ACD having 5mC-preferring activity, but these stabilization mutations can be used to stabilize any cytidine deaminase, regardless of target activity, including the ability to stabilize cytidine deaminases having 5hmC-deficient activity, 5mC- and 5hmC-preferring activity, or 5hmC-preferring activity or any other ACD activity. Thus, in some embodiments, the ACD have one or more stability-enhancing alterations, two or more stability-enhancing alterations, three or more stability-enhancing alterations; four or more stability-enhancing alterations; five or more stability-enhancing alterations; six or more stability-enhancing alterations; seven or more stability-enhancing alterations; eight or more stability-enhancing alterations; nine or more stability-enhancing alterations; ten or more stability-enhancing alterations; eleven or more stability-enhancing alterations; twelve or more stability-enhancing alterations; thirteen or more stability-enhancing alterations; or fourteen or more stability-enhancing alterations. Suitable stability-enhancing alterations can be found in Table 4 and 6, with specific examples included in Table 5, and can be combined in any number of combinations, including those described in Tables 7 and 8.

[0135] An ACD having a substitution mutation that enhances stability can have 5mC selective deaminase activity, 5hmC-deficient activity, 5mC- and 5hmC-preferring activity, or 5hmC-preferring activity. A substitution mutation that enhances stability can be present in an ACD that includes one or more of the selectivity-enhancing substitution mutations described herein, including but not limited to (i) a substitution mutation at a position functionally equivalent to D133, (ii) one or more selectivity-enhancing substitution mutations at a position functionally equivalent to amino acids having proximity to the active site as described herein, (iii) one or more selectivity-enhancing substitution mutations at a position functionally equivalent to amino acids that are expected to co-evolve with residues 57, 97, 98, 130, 130, 132, and/or 134, (iv) one or more selectivity-enhancing alterations at a position functionally equivalent to amino acids based on the observation that substitution mutations at position 103 in an APOBEC3A protein affect selectivity, and deletion of residues 104-105 is beneficial to stability, (v) one or more selectivity-enhancing alterations in Table 2, and/or (vi) one or more selectivity-enhancing alterations in Table 3.

[0136] A stability-enhancing alteration can be a substitution mutation at a position functionally equivalent to an amino acid, a deletion, or an insertion; a substitution mutation in combination with one or more deletions and one or more insertions; and combinations of one or more stability-enhancing substitution mutations in combination with one or more deletion, one or more insertion, or in combination with both one or more deletion and one or more insertion. A stability-enhancing alteration (e.g., substitution mutation, deletion, or insertion) is considered to enhance the stability of an ACD if it increases the melting temperature of the ACD. A substitution mutation, deletion, or insertion is considered to be stability-enhancing if it can increase the melting temperature of an ACD by at least 1° C., at least 2° C., at least 3° C., at least 4° C., at least 5° C., or at least 6° C. compared to the same ACD that does not have the stability-enhancing substitution mutation. A suitable method of determining the melting temperature of an ACD described herein is by fluorimetry (see Examples 2 and 5). However, it is well within one skilled in the art to determine the melting temperature of the ACDs described herein.

[0137] The locations of stability-enhancing substitution mutations have been identified and the specific substitutions predicted using various approaches including rational design, phylogenetic analysis, energy calculations, interface stabilization, EVmutation (Hopf et al., Nat Biotechnol. 2017 February; 35(2): 128-135. doi:10.1038/nbt.3769.), and EVcoupling (Hopf et al., Bioinformatics, 2019 May 1; 35(9):1582-1584. doi: 10.1093/bioinformatics/bty862.). Suitable examples of stability-enhancing substitutions that can be present in an ACD having 5mC-selective deaminase activity, 5hmC-deficient activity, 5mC- and 5hmC-preferring activity, or 5hmC-preferring activity can be found in Tables 4 and 5 and can be combined in any number of combinations to provide improved stability. In some examples, the locations of amino acids in an APOBEC3A (SEQ ID NO:3) where substitution mutation result in increased stability include A112X, A126X, A139X, A148X, A185X, A192X, A59X, A87X, C106X, C161X, C171X, C34X, D145X, D156X, D163X, D167X, D177X, D180X, D41X, D77X, D85X, E109X, E116X, E138X, E157X, E38X, G105X, G108X, G188X, G25X, G27X, H119X, H11X, H16X, H182X, H29X, H51LX, I17X, I26X, I89X, K47X, K60X, L135X, L62X, L78X, M14X, M48X, N117X, N196X, N21X, N42X, P80X, Q115X, Q141X, Q169X, Q184X, R111X, R123X, R189X, R39X, R74X, R91X, S103X, S183X, S187X, S20X, S45X, T118X, T164X, T19X, T31X, T93X, V110X, V79X, L12X, D14X, T19X, G27X, R28X, E38X, F54X, H56X, N57X, Y67X, L73X, D77X, S81X, Y90X, I96X, S97X, C101X, F102X, W104X, C106X, A107X, L114X, V120X, L122X, R128X, Y136X, M142X, A146X, K159X, C161X, L186X, and any combination thereof where the position number designation is functionally equivalent to the position in a wild-type APOBEC3A (SEQ ID NO:3) and X is an amino acid substitution different from the wild-type amino acid at that position. As discussed above, one or more of these stabilizing mutations may be contemplated in combination. Specific examples of substitution mutations identified as stabilizing in different scaffolds are shown in Table 5.

TABLE 4
Stability-enhancing positions (relative to APOBEC A3A).
Substitution mutation position¹

A112X
A126X
A139X
A148X
A185X
A192X
A59X
A87X
C106X
C161X
C171X
C34X
D145X
D156X
D163X
D167X
D177X
D180X
D41X
D77X
D85X
E109X
E116X
E138X
E157X
E38X
G105X
G108X
G188X
G25X
G27X
H119X
H11X
H16X
H182X
H29X
H51LX
I17X
I26X
I89X
K47X
K60X
L135X
L62X
L78X
M14X
M48X
N117X
N196X
N21X
N42X
P80X
Q115X
Q141X
Q169X
Q184X
R111X
R123X
R189X
R39X
R74X
R91X
S103X
S183X
S187X
S20X
S45X
T118X
T164X
T19X
T31X
T93X
V110X
V79X
L12X
D14X
T19X
G27X
R28X
E38X
F54X
H56X
N57X
Y67X
L73X
D77X
S81X
Y90X
I96X
S97X
C101X
F102X
W104X
C106X
A107X
L114X
V120X
L122X
R128X
Y136X
M142X
A146X
K159X
C161X
L186X
¹Position of the substitution mutation where the position number designation is functionally equivalent to the position in a wild-type APOBEC3A (SEQ ID NO: 3) and X is an amino acid substitution different from the wild-type amino acid at that position.

TABLE 5
Stability-enhancing substitution mutations.

| Substitution | | |
|---|---|---|
| mutation tested at | | Mutation identified |
| the position¹ | Scaffold² | as stabilizing³ |
| A112D | ScK | − |
| A112F | ScK | − |
| A112H | ScK | + |
| A112T | ScK | − |
| A112Y | ScK | − |
| A126C | ScK | +++ |
| A126F | ScE | +++ |
| A126I | ScE | + |
| A126L | ScE | + |
| A126S | ScK | − |
| A126V | ScE | − |
| A139G | ScK | +++ |
| A139Q | ScK | − |
| A139V | ScK | − |
| A139W | ScK | − |
| A146E | ScK | − |
| A146G | ScK | − |
| A148L | ScK | − |
| A148V | ScE | + |
| A185F | ScE | + |
| A185H | ScE | + |
| A185I | ScE | +++ |
| A185R | ScK | +++ |
| A192E | ScK | +++ |
| A192I | ScK | +++ |
| A192K | ScK | +++ |
| A192L | ScK | +++ |
| A192R | ScK | +++ |
| A192W | ScK | + |
| A59P | ScE | + |
| A87R | ScE | + |
| C101W | ScK | − |
| C106I | ScE | + |
| C106K | ScK | − |
| C106S | ScE | + |
| C106T | ScE | + |
| C108E | ScK | − |
| C108F | ScK | − |
| C108K | ScK | − |
| C108M | ScK | − |
| C108S | ScK | − |
| C161I | ScE | + |
| C161L | ScE | + |
| C161M | ScE | +++ |
| C161V | ScE | + |
| C171A | ScB | +++ |
| C171I | ScE | + |
| C171R | ScK | +++ |
| C34I | ScE | + |
| C34L | ScE | + |
| C34R | ScK | − |
| D145R | ScK | +++ |
| D14Y | ScE | +++ |
| D156P | ScK | +++ |
| D156W | ScK | +++ |
| D163W | ScK | +++ |
| D177E | ScK | + |
| D180E | ScB | + |
| D180H | ScK | +++ |
| D180W | ScB | +++ |
| D41K | ScE | + |
| D77R | ScE | + |
| D85I | ScK | +++ |
| D85L | ScK | +++ |
| E109L | ScK | +++ |
| E109Q | ScB | +++ |
| E109T | ScK | − |
| E109W | ScK | +++ |
| E116F | ScK | − |
| E116L | ScK | +++ |
| E116V | ScK | − |
| E138A | ScK | +++ |
| E138F | ScK | − |
| E138I | ScK | − |
| E138L | ScK | + |
| E138M | ScK | − |
| E138P | ScK | − |
| E138Q | ScK | − |
| E138R | ScK | +++ |
| E138W | ScK | + |
| E157W | ScE | + |
| E38W | ScK | +++ |
| E38Y | ScK | +++ |
| F102N | ScK | − |
| G105K | ScK | − |
| G105L | ScE | + |
| G105N | ScK | − |
| G105S | ScB | − |
| G105W | ScK | − |
| G105Y | ScK | − |
| G108A | ScB | +++ |
| G108C | ScB | +++ |
| G108D | ScE | + |
| G108H | ScE | + |
| G108I | ScB | − |
| G108L | ScE | + |
| G108M | ScE | + |
| G108P | ScB | + |
| G108Q | ScE | + |
| G108R | ScE | + |
| G108W | ScE | + |
| G108Y | ScE | +++ |
| G188Y | ScB | +++ |
| G188A | ScE | + |
| G188I | ScB | +++ |
| G188L | ScE | − |
| G188Q | ScB | +++ |
| G188R | ScB | +++ |
| G25A | ScE | + |
| G25D | ScE | + |
| G25K | ScB | +++ |
| G25L | ScB | + |
| G25R | ScB | +++ |
| G25V | ScB | +++ |
| G27C | ScK | + |
| G27F | ScK | +++ |
| G27I | ScE | + |
| G27L | ScE | + |
| G27R | ScK | +++ |
| G27Y | ScK | +++ |
| H119W | ScE | + |
| H11E | ScK | − |
| H11L | ScE | +++ |
| H11P | ScE | + |
| H11R | ScE | + |
| H16D | ScK | +++ |
| H16L | ScB | + |
| H182N | ScK | +++ |
| H29R | ScK | + |
| H51L | ScB | +++ |
| H56R | ScK | − |
| I17T | ScE | +++ |
| I26A | ScK | +++ |
| I26L | ScK | +++ |
| I26R | ScE | +++ |
| I89C | ScE | + |
| I89D | ScE | + |
| I89H | ScE | +++ |
| I89Q | ScE | + |
| I89R | ScE | +++ |
| I89R | ScK | +++ |
| I89S | ScE | + |
| I89T | ScE | +++ |
| I96T | ScB | − |
| K159R | ScK | − |
| K47P | ScE | +++ |
| K47P | ScK | + |
| K60G | ScK | +++ |
| K60P | ScE | + |
| K60R | ScK | +++ |
| L114G | ScK | − |
| L122D | ScK | − |
| L12W | ScK | − |
| L135F | ScK | + |
| L135Q | ScK | − |
| L135R | ScK | − |
| L135W | ScK | − |
| L186W | ScB | − |
| L62P | ScE | +++ |
| L73A | ScB | − |
| L78H | ScE | +++ |
| M142A | ScK | − |
| M142L | ScK | − |
| M142R | ScK | + |
| M142T | ScK | + |
| M142W | ScK | − |
| M48D | ScK | +++ |
| M48E | ScK | +++ |
| M48K | ScK | +++ |
| M48L | ScK | +++ |
| M48N | ScK | +++ |
| M48Q | ScK | +++ |
| M48S | ScK | +++ |
| N117W | ScE | + |
| N117Y | ScK | − |
| N196P | ScE | + |
| N21H | ScE | + |
| N21Q | ScK | + |
| N21W | ScE | + |
| N42D | ScK | +++ |
| N42G | ScK | +++ |
| N57D | ScE | − |
| P80D | ScE | + |
| P80E | ScE | + |
| P80F | ScE | + |
| P80G | ScE | +++ |
| P80H | ScE | + |
| P80K | ScE | + |
| P80L | ScE | + |
| P80Q | ScE | + |
| P80R | ScE | +++ |
| P80S | ScE | +++ |
| P80T | ScE | +++ |
| P80V | ScE | + |
| P80W | ScE | + |
| P80Y | ScE | + |
| Q115C | ScK | + |
| Q115K | ScK | +++ |
| Q115L | ScK | − |
| Q115M | ScK | − |
| Q115W | ScK | + |
| Q115Y | ScK | +++ |
| Q141R | ScE | + |
| Q169R | ScK | + |
| Q184V | ScK | +++ |
| R111A | ScK | +++ |
| R111E | ScK | − |
| R111Q | ScK | − |
| R111V | ScK | +++ |
| R123H | ScB | +++ |
| R128Y | ScK | − |
| R189K | ScK | +++ |
| R28V | ScK | − |
| R39L | ScE | + |
| R74C | ScE | + |
| R74L | ScA | +++ |
| R74N | ScB | − |
| R91L | ScB | + |
| S103C | ScK | − |
| S103D | ScK | − |
| S103F | ScE | + |
| S103H | ScE | + |
| S103H | ScK | + |
| S103I | ScK | − |
| S103K | ScK | − |
| S103L | ScK | − |
| S103M | ScK | − |
| S103Q | ScK | − |
| S103R | ScE | +++ |
| S103R | ScK | − |
| S103T | ScK | +++ |
| S103W | ScK | +++ |
| S103Y | ScE | +++ |
| S103Y | ScK | +++ |
| S183F | ScE | +++ |
| S183V | ScK | +++ |
| S183W | ScE | +++ |
| S183Y | ScK | + |
| S187E | ScE | + |
| S187F | ScK | + |
| S187I | ScE | + |
| S187Q | ScK | +++ |
| S187W | ScE | + |
| S187Y | ScK | + |
| S20E | ScK | +++ |
| S20F | ScE | +++ |
| S20F | ScK | +++ |
| S20H | ScK | +++ |
| S20I | ScK | +++ |
| S20W | ScK | +++ |
| S20Y | ScK | +++ |
| S45R | ScE | +++ |
| S45T | ScB | + |
| S45W | ScB | +++ |
| S81W | ScK | − |
| S97L | ScK | − |
| S97Y | ScK | − |
| T118K | ScK | − |
| T118P | ScE | +++ |
| T118W | ScB | − |
| T164I | ScE | + |
| T19F | ScE | − |
| T19I | ScE | +++ |
| T19L | ScE | +++ |
| T19W | ScE | + |
| T19Y | ScB | +++ |
| T31F | ScE | + |
| T31I | ScE | +++ |
| T31W | ScE | +++ |
| T93I | ScE | + |
| V110L | ScK | +++ |
| V110W | ScK | +++ |
| V120H | ScK | − |
| V120N | ScK | − |
| V79L | ScE | + |
| W104L | ScK | − |
| W104R | ScK | − |
| W94L | ScB | − |
| Y136D | ScK | − |
| Y136K | ScK | − |
| Y136W | ScK | − |
| Y90G | ScB | − |

¹Position of the substitution mutation and the identity of the substitution mutation tested at the position in exemplary scaffold APOBEC background. For instance, H11L means the histidine at position 11 was replaced with a leucine.
²Each substitution mutation was tested in an APOBECA3A protein (SEQ ID NO: 3) scaffold background that included the additional substitution mutations: e.g., ScB, Y130A/Y132H/C171A (SEQ ID NO: 68); ScE, Y130A/Y132H/D133W/R74L/C171A/T19Y (SEQ ID NO: 72); ScK, Y130A/Y132H/D133W/R74L/T19Y/C171A/G108C/G188R/G25K/S45W/I17T/A59P/K60R/Δ61-68 (SEQ ID NO: 75); ScA, Y130A/Y132H/D133W (SEQ ID NO: 69).
³+++, the substitution mutation increased stability substantially; +, the substitution mutation increased stability;; −, the substitution mutation did not increase stability. See Examples 2-5. Other scaffold backgrounds for addition of these mutations are contemplated and this table is exemplary.

[0138] A stability-enhancing alteration can be a deletion. Tolerance to engineered deletions and insertions can be correlated with the rigidity of secondary structures. Beta sheets and helices tend to be the least tolerant to deletions and insertions, while loops and unstructured regions can be more tolerant. Loops in an APOBEC3A were identified and subjected to deletion mutagenesis, and the location of stability-enhancing substitution mutations that are deletions were identified. In some cases, the deletions have been tested. In one embodiment, the deletions are at positions functionally equivalent to positions shown in Table 6.

TABLE 6
Stability-enhancing deletions

| | Exemplary Scaffold² | |
|---|---|---|
| Deletion¹ | used in construction | Effect³ (−/+/++) |
| ΔM1-L12 (the first | ScK (SEQ ID NO: 75) and | + |
| 12 amino acids of | ScI (SEQ ID NO: 77) | |
| human APOBECA3A | | |
| (SEQ ID NO: 3) | | |
| ΔE36-G53 | | − |
| ΔN42 | ScK (SEQ ID NO: 75) | − |
| ΔN61-G68 | ScF (SEQ ID NO: 74) | ++ |
| ΔP86 | ScK (SEQ ID NO: 75) | − |
| ΔW104-G105 | ScK (SEQ ID NO: 75) | ++ |
| ΔL135-K137 | ScK (SEQ ID NO: 75) | +/increases |
| | | preference for C |
| ΔP172 | ScK (SEQ ID NO: 75) | − |
| ΔS187-N199 | ScK (SEQ ID NO: 75) | + |
| ΔI26-G27 | ScK (SEQ ID NO: 75) | ++/increases |
| | | preference for C |

¹Position of the deletion in an APOBEC3A (SEQ ID NO: 3).
²Deletions tested and found to increase stability when present in an APOBECA3A protein that included the Y130A and Y132H substitution mutations.
³(−) does not increase stability; (+) neutral effect; (++) increases stability, some positions also increased selectivity as noted. See Example 4-5.

[0139] Also note that the one or more ACD described herein may include one or more of the alterations in Table 4 (substitutions), Table 5 (substitutions), or Table 6 (deletions) as they may confer other desirable or beneficial effects (e.g., solubility, expression) for the cytidine deaminase. Therefore, the present ACD contemplated may contain one or more deletion (e.g., ΔS187-N199) to provide additional beneficial properties and may be used in connection with the selectivity/stability mutations of the present disclosure.

[0140] Some deletions can further include one or more ancillary substitution mutations. An ACD described herein can include the A61-68 deletion and the ancillary substitution mutation at (i) the position functionally equivalent to A59 where the mutation is to proline (A59P) or leucine (A59L), (ii) the position functionally equivalent to K60 where the mutation is to arginine (K60R), glutamic acid ((K60E), glutamine (K60Q), or glycine (K60G), or (iii) the position functionally equivalent to R69 (i.e., the position 69 prior to the deletion of 61-68) where the mutation is to tyrosine (R69Y), asparagine (R69N, histidine (R69H), aspartic acid (R69D), or leucine (R69L). Specific combinations of the Δ61-68 deletion and ancillary substitution mutations are Δ61-68/Δ59P/K60R, Δ61-68/Δ59L/R69Y, Δ61-68/Δ59L/K60E/R69N, Δ61-68/Δ59P/K60E/R69H, Δ61-68/Δ59P/K60Q/R69H, Δ61-68/Δ59L/R69N, Δ61-68/R69D, Δ61-68/Δ59L/K60R, and Δ61-68/Δ59P/K60G/R69L. An ACD described herein can include the A104-105 deletion and the ancillary substitution mutation at the position functionally equivalent to F102 where the mutation is to arginine (F102R), the substitution mutation at the position functionally equivalent to S103 where the mutation is to asparagine (S103N), or both substitution mutations F102R and S103N. In another embodiment, an ACD described herein can include both the Δ104-105 deletion and the Δ1-12 deletion. Additional embodiments include: an ACD having the Δ104-105 deletion, the Δ1-12 deletion, and the substitution mutation F102R; an ACD having the Δ104-105 deletion, the Δ1-12 deletion, and the substitution mutation S103N; and an ACD having the Δ104-105 deletion, the Δ1-12 deletion, and the substitution mutations F102R and S103N.

[0141] An ACD having 5mC-selective deaminase activity, 5hmC-deficient activity, 5mC- and 5hmC-preferring activity, or 5hmC-preferring activity described herein can further include one or more stability-enhancing alterations selected from I17T, T19Y, G25K, S45W, A59P, K60R, deletion of 61-68, R74L, deletion of W104, deletion of G105, G108C, A126C, C171A, G188R, or a combination thereof, where the substitution mutation or a deletion is at a position functionally equivalent to an amino acid in a member of the APOBEC protein family, including a member of the APOBEC3A subfamily (for instance, SEQ ID NO:3). An ACD having wild-type activity or 5mC-preferring activity described herein can further include the stability-enhancing alterations I17T, T19Y, G25K, S45W, A59P, K60R, deletion of 61-68, R74L, deletion of W104, deletion of G105, G108C, C171A, and G188R (SEQ ID NO:77) where the substitution mutation or a deletion is at a position functionally equivalent to an amino acid in a member of the APOBEC protein family, including a member of the APOBEC3A subfamily (for instance, SEQ ID NO:3). An ACD having wild-type activity or 5mC-preferring activity described herein can further include the stability-enhancing alterations I17T, T19Y, G25K, S45W, A59P, K60R, deletion of 61-68, R74L, G108C, C171A, and G188R (SEQ ID NO:117) where the substitution mutation or a deletion is at a position functionally equivalent to an amino acid in a member of the APOBEC protein family, including a member of the APOBEC3A subfamily (for instance, SEQ ID NO:3). An ACD having wild-type activity or 5mC-preferring activity described herein can further include the stability-enhancing alterations I17T, T19Y, G25K, S45W, A59P, K60R, deletion of 61-68, R74L, deletion of G105, G108C, C171A, and G188R (SEQ ID NO:125), where the substitution mutation or a deletion is at a position functionally equivalent to an amino acid in a member of the APOBEC protein family, including a member of the APOBEC3A subfamily (for instance, SEQ ID NO:3).

[0142] For example, one or more additional stability-enhancing alterations of Table 4-6 can be added to any one of the specificity-enhancing alterations described herein (e.g., (i) one or more selectivity-enhancing substitution mutations at a position functionally equivalent to amino acids having proximity to the active site as described herein, (ii) one or more selectivity-enhancing substitution mutations at a position functionally equivalent to amino acids that are expected to co-evolve with residues 57, 97, 98, 130, 130, 132, and/or 134, (iii) one or more selectivity-enhancing alterations at a position functionally equivalent to amino acids based on the observation that substitution mutations at position 103 in an APOBEC3A protein affect selectivity, and deletion of residues 104-105 is beneficial to stability, (iv) one or more selectivity-enhancing alterations in Table 2, and/or (v) one or more selectivity-enhancing alterations in Table 3). Examples of ACDs that include one or more stability-enhancing alterations in addition to one or more specificity-enhancing alterations include, but are not limited to, SEQ ID NO:68 (ScB), SEQ ID NO:69 (ScA), SEQ ID NO:70 (ScD), SEQ ID NO:71 (ScC), SEQ ID NO:72 (ScE), SEQ ID NO:73 (ScL), SEQ ID NO:74 (ScF), SEQ ID NO:75 ScK), SEQ ID NO:76 (ScJ), or SEQ ID NO:77 (ScI).

[0143] Examples of combinations of stability-enhancing alterations that can be present in an ACD are also described at Table 7 and 8. In some embodiments, an ACD that includes one or more selectivity-enhancing alterations described herein can further include one or more stability-enhancing alterations selected from I17T, T19Y, G25K, S45W, A59P, K60R, deletion of 61-68, R74L, deletion of W104, deletion of G105, G108C, A126C, C171A, G188R, or a combination thereof, where the substitution mutation or a deletion is at a position functionally equivalent to an amino acid in a member of the APOBEC protein family, including a member of the APOBEC3A subfamily (for instance, SEQ ID NO:3). In one embodiment, an ACD that includes one or more selectivity-enhancing alterations described herein includes stability-enhancing alterations I17T, T19Y, G25K, S45W, A59P, K60R, deletion of 61-68, R74L, G108C, C171A, and G188R where the substitution mutation or a deletion is at a position functionally equivalent to an amino acid in a member of the APOBEC protein family, including a member of the APOBEC3A subfamily (for instance, SEQ ID NO:3). In one embodiment, an ACD that includes one or more selectivity-enhancing alterations described herein includes stability-enhancing alterations I17T, T19Y, G25K, S45W, A59P, K60R, deletion of 61-68, R74L, deletion of G105, G108C, C171A, and Gi88R where the substitution mutation or a deletion is at a position functionally equivalent to an amino acid in a member of the APOBEC protein family, including a member of the APOBEC3A subfamily (for instance, SEQ ID NO:3).

[0144] An ACD having a stability-enhancing alteration can further include one or more selectivity-enhancing alterations, such as (i) a substitution mutation at a position functionally equivalent to D133, (ii) one or more selectivity-enhancing substitution mutations at a position functionally equivalent to amino acids having proximity to the active site as described herein, (iii) one or more selectivity-enhancing substitution mutations at a position functionally equivalent to amino acids that are expected to co-evolve with residues 57, 97, 98, 130, 130, 132, and/or 134, (iv) one or more selectivity-enhancing alterations at a position functionally equivalent to amino acids based on the observation that substitution mutations at position 103 in an APOBEC3A protein affect selectivity, and deletion of residues 104-105 is beneficial to stability, (v) one or more selectivity-enhancing alterations in Table 2, and/or (vi) one or more selectivity-enhancing alterations in Table 3.

[0145] The inventors found that ACDs with at least one selectivity-enhancing mutation such as D133W, at least one stability-enhancing mutation, such as R74L, and a Y130A mutation had improved 5mC selectivity regardless of which amino acid was present at Y132. Thus, in one embodiment an ACD can include the substitution mutations X1/Y130A/Y132X2/D133X3, where X1 is any one or more stability-enhancing substitution, X2 is any amino acid, and X3 is any amino acid, and in one embodiment is W or C.

[0146] The inventors have observed that addition of stability-enhancing substitution alterations to an ACD that includes other stability-enhancing alterations results in an additive effect. Proteins can be dramatically stabilized without reducing biological function of the protein (Bloom et al., PNAS, 103(15):5869-5874), and this additive effect of stability-enhancing mutations has been observed by the inventors in ACD proteins (see FIG. 8). Accordingly, the inventors expect that addition of any subset of stability-enhancing alterations is possible and that they will result in increases in stability without sacrificing activity. Thus, in another embodiment, an ACD can have more than one stability-enhancing alteration. For instance, an ACD having substitutions conferring 5mC selective deaminase activity or 5mC- and 5hmC-preferring activity (e.g., Y130A or Y130A/Y132H), can further include more than one stability-enhancing alteration. The stability-enhancing alterations can be (i) one or more stability-enhancing substitution mutation at a position functionally equivalent to where the position number designation is functionally equivalent to the position in a wild-type APOBEC3A (SEQ ID NO:3) and X is an amino acid substitution different from the wild-type amino acid at that position, (ii) one or more stability-enhancing substitution mutation at a position functionally equivalent to any of those listed in Table 4, and/or (iii) one or more stability-enhancing deletion at a position functionally equivalent to those listed in Table 6 and optionally one or more ancillary substitution mutations. In one embodiment, a substitution mutation or a deletion is at a position functionally equivalent to an amino acid in a member of the APOBEC protein family, including a member of the APOBEC3A subfamily (for instance, SEQ ID NO:3).

[0147] Without intending to limit the particular combinations of stability-enhancing alterations encompassed by the present disclosure, specific examples of combinations of stability-enhancing alterations that can be present in an ACD having 5mC-selective deaminase activity, 5hmC-deficient activity, 5mC- and 5hmC-preferring activity, or 5hmC-preferring activity and one or more specificity-enhancing alterations described herein include but are not limited to those shown in Table 2 or 3. Many more combinations are contemplated and these Tables are not to be considered exhaustive. In some examples the ACDs include those having structural similarity to (i) SEQ ID NO:3, (ii) SEQ ID NO:16 (iii) SEQ ID NO:17, (iv) SEQ ID NO:69, (v) SEQ ID NO:37 and having a W at amino acid 133, (vi) SEQ ID NO:138 and having an A, G, F, H, Q, M, N, K, V, D, E, S, C, P or T, at amino acid 130, a R, H, K, Q at amino acid 132, and a valine at amino acid 133, or (vii) SEQ ID NO:139 and having an aspartic acid at amino acid 130, and H, R, or K at amino acid 132, and an A, G, S, or T at amino acid 133, and at least one of the following combinations of stabilizing mutations, where the numbering is based on SEQ ID NO:3: R74X/C171X; R74X/T19X; R74X/G25X; R74X/T19X/C171X; R74X/T19X/C171X; R74X/T19X/C171X/I17X; R74X/T19X/C171X/G25X; R74X/T19X/C171X/G25X/I17X; R74X/T19X/C171X/G25X/T19X; R74X/T19X/C171X/G25X; R74X/T19X/C171X/S45X; R74C/T19X/C171X; R74X/T19X/C171X/T19X; R74X/T19X/C171X/T19X; R74X/T19X/C171X/G108X; R74X/T19X/C171X/G108X; R74X/T19X/C171X/G108X; R74X/T19X/C171X/G108X; R74X/T19X/C171X/G108X; R74X/T19X/C171X/G108X; R74X/T19X/C171X/G108X; R74X/T19X/C171X/G108X; R74X/T19X/C171X/A126X; R74X/T19X/C171X; R74X/T19X/C171X/G108X; R74X/T19X/C171X/G108X; R74X/T19X/C171X/A126X; R74X/T19X/C171X/A126X; R74X/T19X/C171X/A126X; R74X/T19X/C171X; R74X/T19X/C171X/S45X; R74X/T19X/C171X/G25X; R74X/T19X/C171X/G25X; R74X/T19X/C171X/G188X; R74X/T19X/C171X/G188X; R74X/T19X/C171X/G188X; R74X/T19X/C171X/G108X; R74X/T19X/C171X/G108X/G188X/G25X/S45X; R74X/T19X/C171X/G108X; R74X/T19X/C171X/G108X/G188X/G25X/S45X/I17X; R74X/T19X/C171X/G108X/G188X/G25X/S45X/I17X/A59X/K60X/A61-68; R74X/T19X/C171X/G108X/G188X/G25X/S45X/I17X; R74X/T19X/C171X/G108X/G188X/G25X/S45X/I17X/A59X/K60X/A61-68/A126X; R74X/T19X/C171X/G108X/G188X/G25X/S45X/I17X/A59X/K60X/A61-68, I17X/T19X/G25X/S45X/A59X/K60X/deletion of 61-68/R74X/G108X/C171X/G188X; or I17X/T19X/G25KXS45X/A59X/K60X/deletion of 61-68/R74X/deletion of G105/G108X/C171X/G188X, wherein X is an amino acid substitution different than wildtype.

[0148] In some examples, the altered cytosine deaminases include, but are not limited to, for example, those having structural similarity to (i) SEQ ID NO:3, (ii) SEQ ID NO:16 (iii) SEQ ID NO:17, (iv) SEQ ID NO:69, (v) SEQ ID NO:137 and having a W at amino acid 133, (vi) SEQ ID NO:138 and having an A, G, F, H, Q, M, N, K, V, D, E, S, C, P or T, at amino acid 130, a R, H, K, Q at amino acid 132, and a valine at amino acid 133, or (vii) SEQ ID NO:139 and having an aspartic acid at amino acid 130, and H, R, or K at amino acid 132, and an A, G, S, or T at amino acid 133, and at least one of the following combinations of stabilizing mutations, where the numbering is based on SEQ ID NO:3: R74L/C171A; R74L/T19Y; R74L/G25R; R74L/T19I/C171A; R74L/T19L/C171A; R74L/T19Y/C171A/I17T; R74L/T19Y/C171A/G25A; R74L/T19Y/C171A/G25R/I17T; R74L/T19Y/C171A/G25R/T19F; R74L/T19Y/C171A/G25D; R74L/T19Y/C171A/S45R; R74C/T19Y/C171A; R74L/T19Y/C171A/T19F; R74L/T19Y/C171A/T19W; R74L/T19Y/C171A/G108E; R74L/T19Y/C171A/G108D; R74L/T19Y/C171A/G108Q; R74L/T19Y/C171A/G108Y; R74L/T19Y/C171A/G108H; R74L/T19Y/C171A/G108L; R74L/T19Y/C171A/G108K; R74L/T19Y/C171A/G108R; R74L/T19Y/C171A/A126V; R74L/T19Y/C171I; R74L/T19Y/C171A/G108M; R74L/T19Y/C171 A/G108W; R74L/T19Y/C171 A/A126F; R74L/T19Y/C171 A/A126I; R74L/T19Y/C171 A/A126L; R74L/T19Y/C171 A; R74L/T19Y/C171 A/S45W; R74L/T19Y/C171A/G25R; R74L/T19Y/C171A/G25K; R74L/T19Y/C171A/G188Q; R74L/T19Y/C171A/G188A; R74L/T19Y/C171A/G188R; R74L/T19Y/C171A/G18A; R74L/T19Y/C171A/G18A/G188R/G25K/S45W; R74L/T19Y/C171A/G18C; R74L/T19Y/C171A/G18A/G188R/G25K/S45W/17T; R74L/T19Y/C171A/G108A/G188R/G25K/S45 W/7T/A59P/K6R/A61-68; R74L/T19Y/C171A/G18C/G188R/G25K/S45W/17T; R74L/T19Y/C171A/G18C/G188R/G25K/S45W/17T/A59P/K6R/A61-68/A126C; R74L/T19Y/C171A/G18C/G188R/G25K/S45W/17T/A59P/K6R/A61-68.

TABLE 7
Examples of ACDs with more than one
stability-enhancing alteration.

| | |
|---|---|
| G108A, | + |
| G108A, G188A, | + |
| G108A, G188A, G25K, | + |
| G108A, G188A, G25K, S45W | + |
| G108A, G188A, G25R, | + |
| G108A, G188A, G25R, S45W | + |
| G108A, G188A, S45W | +++ |
| G108A, G188Q, | + |
| G108A, G188Q, G25K, | + |
| G108A, G188Q, G25K, S45W | +++ |
| G108A, G188Q, G25R, | − |
| G108A, G188Q, G25R, S45W | +++ |
| G108A, G188Q, S45W | +++ |
| G108A, G188R, | + |
| G108A, G188R, G25K, | + |
| G108A, G188R, G25K, S45W | +++ |
| G108A, G188R, G25R, | + |
| G108A, G188R, G25R, S45W | +++ |
| G108A, G188R, S45W | +++ |
| G108A, G25K, | + |
| G108A, G25K, S45W | +++ |
| G108A, G25R, | + |
| G108A, G25R, S45W | + |
| G108A, S45W | + |
| G108C, | + |
| G108C, G188A, | + |
| G108C, G188A, G25K, | + |
| G108C, G188A, G25K, S45W | +++ |
| G108C, G188A, G25R, | + |
| G108C, G188A, G25R, S45W | +++ |
| G108C, G188A, S45W | +++ |
| G108C, G188Q, | + |
| G108C, G188Q, G25K, | + |
| G108C, G188Q, G25K, S45W | + |
| G108C, G188Q, G25R, | + |
| G108C, G188Q, G25R, S45W | + |
| G108C, G188Q, S45W | +++ |
| G108C, G188R, | + |
| G108C, G188R, G25K, | + |
| G108C, G188R, G25K, S45W | +++ |
| G108C, G188R, G25R, | + |
| G108C, G188R, G25R, S45W | +++ |
| G108C, G188R, S45W | +++ |
| G108C, G25K, | + |
| G108C, G25K, S45W | +++ |
| G108C, G25R, | + |
| G108C, G25R, S45W | +++ |
| G108C, S45W | + |
| G188A, | + |
| G188A, G25K, | + |
| G188A, G25K, S45W | + |
| G188A, G25R, | + |
| G188A, G25R, S45W | +++ |
| G188A, S45W | +++ |
| G188Q, | + |
| G188Q, G25K, | + |
| G188Q, G25K, S45W | +++ |
| G188Q, G25R, | + |
| G188Q, G25R, S45W | +++ |
| G188Q, S45W | + |
| G188R, | + |
| G188R, G25K, | + |
| G188R, G25K, S45W | +++ |
| G188R, G25R, | + |
| G188R, G25R, S45W | +++ |
| G188R, S45W | + |
| G25K, S45W | +++ |
| G25R, | + |
| G25R, S45W | + |
| S45W | +++ |

Each substitution mutation was tested in an APOBECA3A protein (SEQ ID NO: 3) that included the additional substitution mutations Y130A/Y132H/D133W/R74L/C171A/T19Y (ScE, SEQ ID NO: 72).
1: Position of the substitution mutation and the identity of the substitution mutation tested at the position. For instance, S45W means the serine at position 45 was replaced with a tryptophan.
2: +++, the substitution mutation increased stability substantially; +, the substitution mutation increased stability;; −, the substitution mutation did not increase stability. See Example 3.

TABLE 8
Examples of ACDs with more than one stability-enhancing alteration.
Substitution mutations and deletions¹

A59P, K60R, Δ61-68
A59P, K60R, Δ61-68, Δ104-105
A59P, K60R, Δ61-68, Δ104-105, A126C
A59P, Δ61-68, Δ104-105, K60G
A59P, Δ61-68, Δ104-105, K60G, A126C
A59P, Δ61-68, Δ104-105, K60G, S103T
A59P, Δ61-68, Δ104-105, N21Q, K60G, A126C
A59P, Δ61-68, Δ104-105, K60G, S103T, A126C
A59P, Δ61-68, Δ104-105, K60G, R28V, S103T, A126C
A59P, Δ61-68, Δ104-105, N21Q, K60G, S103T, A126C
A59P, Δ61-68, Δ104-105, N21Q, R28V, K60G, S103T, A126C
¹Position of the substitution mutation and the identity of the substitution mutation, position of deletions. For instance, S45W means the serine at position 45 was replaced with a tryptophan.
2: Each substitution mutation is tested in an APOBECA3A protein (SEQ ID NO: 3) that optionally includes additional stability-enhancing alterations, such as the stability-enhancing alterations in SEQ ID NO: 68 (ScB), SEQ ID NO: 69 (ScA), SEQ ID NO: 70 (ScD), SEQ ID NO: 71 (ScC), SEQ ID NO: 72 (ScE), SEQ ID NO: 73 (ScL), SEQ ID NO: 74 (ScF), SEQ ID NO: 75 (ScK), SEQ ID NO: 76 (ScJ), or SEQ ID NO: 77 (ScI).

[0149] In one embodiment, examples of ACDs having one or more stability-enhancing alteration and optionally one or more selectivity-enhancing substitution mutation are shown at SEQ ID NO:196 or SEQ ID NO:200, where the position number designation is functionally equivalent to the position in a wild-type APOBEC3A (SEQ ID NO:3) and X is an amino acid having the same or a different identity from the wild-type amino acid at that position, or a deletion as noted. As is shown in SEQ ID NOs:196 and 200, numerous amino acids may be mutated to enhance the stability of the ACD. While some mutations may be additive, some may be sufficient independently, depending on the desired activity of the ACD. Thus, the mutations indicated in SEQ ID NOs: 196 and 200 are inclusive of many stability-enhancing mutations that may be made individually or in combination.

[0150] SEQ ID NO:201 is the sequence of one example of an ACD that preferentially deaminates 5-methylcytosine shown with the numerous optional stability mutations of SEQ ID NO:196. SEQ ID NO:202 is the sequence of one example of an ACD that preferentially deaminates 5-hydroxymethylcytosine and 5-methylcytosine shown with the numerous optional stability mutations of SEQ ID NO:196. SEQ ID NO:203 is the sequence of one example of an ACD that preferentially deaminates 5-hydroxymethylcytosine shown with the numerous optional stability mutations of SEQ ID NO:196. SEQ ID NO:216 is the sequence of one example of an ACD that preferentially deaminates unmodified cytosine and 5-methylcytosine shown with the numerous optional stability mutations of SEQ ID NO:196.

[0151] In one embodiment, examples of ACDs having one or more stability-enhancing alteration and optionally one or more selectivity-enhancing substitution mutation are shown at SEQ ID NO:197 or SEQ ID NO:204, where the position number designation is functionally equivalent to the position in a wild-type APOBEC3A (SEQ ID NO:3) and X is an amino acid having the same or a different identity from the wild-type amino acid at that position, or a deletion as noted. As is shown in SEQ ID NOs:197 and 204, numerous amino acids may be mutated to enhance the stability and/or the selectivity of the ACD. While some mutations may be additive, some may be sufficient independently, depending on the desired activity of the ACD. Thus, the mutations indicated in SEQ ID NOs: 197 and 204 are inclusive of many stability- and/or selectivity-enhancing mutations that may be made individually or in combination.

[0152] SEQ ID NO:205 is the sequence of one example of an ACD that preferentially deaminates 5-methylcytosine shown with the numerous optional stability mutations of SEQ ID NO:196. SEQ ID NO:206 is the sequence of one example of an ACD that preferentially deaminates 5-hydroxymethylcytosine and 5-methylcytosine shown with the numerous optional stability mutations of SEQ ID NO:196. SEQ ID NO:207 is the sequence of one example of an ACD that preferentially deaminates 5-hydroxymethylcytosine shown with the numerous optional stability mutations of SEQ ID NO:196. SEQ ID NO:217 is the sequence of one example of an ACD that preferentially deaminates unmodified cytosine and 5-methylcytosine shown with the numerous optional stability mutations of SEQ ID NO:196.

[0153] Some of the stability-enhancing mutations of SEQ ID NOs:196, 197, 200-207, 216, and 217 are described further in Examples 1-8 and 14-19.

[0154] Each “X” in each of SEQ ID NOs:196, 197, 200-207, 216, and 217 may be mutated as described or may be the identity of the amino acid at the corresponding position in wild-type APOBEC3A (SEQ ID NO:3). Each of SEQ ID NOs: 196, 197, 200-207, 216, and 217 include an “X” for each position evaluated for a stability-enhancing alteration. An ACD of the present disclosure can include 1 or more, 2 or more, 3 or more, 4 or more, 5 or more, 6 or more, 7 or more, 8 or more, 9 or more, 10 or more, 11 or more, 12 or more, 13 or more, or 14 or more substitution alterations in any one of 196, 197, 200-207, 216, and 217.

[0155] SEQ ID NOs:69-75, 76, 84, 85, 90, 93, 300-306, 308-369, 373, 376-378. 380-395, 397-486, 488-579, 582-672, 674-861, 864, 866, 872, 873, 877, 880-900, 902, 903, 905, 906, 908, 911, 915-917, 919-927, 929, 930, 932-937, 940, 941, 943-966, 968-977, 979-985, 987-990, 992-997, 999-1004, 1008-1013, 1016, 1018-1025, 1027-1029, 1031, 1033, 1035-1050, 1052-1057, 1059-1062, 1064, 1065, 1069, 1070, 1072-1090, 1092-1110, 1112-1155, 1157-1160, 1162-1165, 1167-1209, 1211-1235, and 1237 represent the amino acid sequences of 852 ACDs that were constructed and screened for activity. Sequences labeled “C” (SEQ ID NOs:310-333) were found to preferentially deaminate unmodified cytosine. Sequences labeled “D” (SEQ ID NOs:300-306, 308, 309) were found to be catalytically inactive. SEQ ID NOs:69-75, 76, 84, 85, 90, 93 and sequences labeled “A” (SEQ ID NOs:333-369, 373, 376-378. 380-395, 397-486, 488-579, 582-672, 674-861, 864, 866, 872, 873, 877, 880-900, 902, 903, 905, 906, 908, 911, 915-917, 919-927, 929, 930, 932-937, 940, 941, 943-966, 968-977, 979-985, 987-990, 992-997, 999-1004, 1008-1013, 1016, 1018-1025, 1027-1029, 1031, 1033, 1035-1050, 1052-1057, 1059-1062, 1064, 1065, 1069, 1070, 1072-1090, 1092-1110, 1112-1155, 1157-1160, 1162-1165, 1167-1209, 1211-1235, and 1237) were found to be catalytically active.

[0156] SEQ ID NOs:1238-1241 represent consensus sequences of a multiple sequence alignment (MSA) of the 852 ACDs described in the preceding paragraph produced using Clustal Omega (McWilliam et al., 2013, Nucleic acids research 2013 July; 41(Web Server issue):W597-600 doi:10.1093/nar/gkt376, available on the world wide web at www.ebi.ac.uk/Tools/msa/clustalo/). SEQ ID NOs:1238-1241 have 100%, 90%, 80%, and 70% consensus with SEQ ID NOs:300-1237, respectively. X represents that there was no consensus residue at a location. Residues that were not identical but otherwise related (e.g., hydrophobic, small, polar, aromatic) in the consensus sequence are annotated within each consensus sequence. For the purposes of these consensus sequences, aliphatic residues include I, L, and V, alcohol residues include S and T, charged residues include D, E, H, K, and R, negatively charged residues include D and E, polar residues include C, D, E, H, K, N, Q, R, S, and T, positively charged residues include H, K, and R, small residues include A, C, D, G, N, P, S, T, and V, tiny residues include A, G, and S, and turnlike residues include A, C, D, E, G, H, K, N, Q, R, S, and T.

[0157] The person of ordinary skill in the art can confirm that the selectivity or the stability of an ACD disclosed herein is enhanced. For example, an ACD described herein can be constructed to include one or more selectivity-enhancing substitution mutations described herein and then evaluated for the appropriate selectivity activity (e.g., enhanced selectivity of 5mC or both 5mC and 5hmC). A suitable assay is the SwaI-based assay described herein, the deamination of 5mC or 5hmC of the ACD and compared to the same protein that does not include the same one or more selectivity-enhancing substitution mutations. In another example, an ACD described herein can be constructed to include one or more stability-enhancing substitution mutations described herein and then evaluated to determine is stability is increased. A suitable assay is the fluorimetry assay described herein.

[0158] An ACD described herein can include additional mutations. Typically, additional mutations do not unduly alter the activity of the altered cytidine deaminase. One or more additional mutations can be a conservative mutation. The specification discloses at FIG. 2 an alignment between a human APOBEC3A (SEQ ID NO:3, referred to as splP31941|1-199 in the figure), and other APOBEC3A proteins from other primates. The identical amino acids are marked with an “*” (asterisk), a “:” (colon) indicates conservation between amino acids of strongly similar properties, and a “.” (period) indicates conservation between groups of weakly similar properties. The skilled person would expect that many conservative substitutions in the areas that are identical or similar between the protein in the alignment would be likely to result in an active protein. Likewise, the skilled person would expect that many non-conservative substitutions in the areas that are identical or similar between the proteins in the alignment would be more likely to result in an inactive protein. Moreover, the location of the highly conserved spatial arrangement of the catalytic center residues of the ZDD motif is disclosed. The ZDD motif includes the H and two C residues which are believed to coordinate a Zn atom and the E residue which polarizes a water molecule near the Zn-atom for catalysis. As discussed herein the active site includes conserved residues such as tryptophan at position 98, serine or threonine at position 99, arginine at position 28, histidine, asparagine, or arginine at position 29, serine or threonine, preferably threonine, at position 31, asparagine or aspartic acid at position 57, tyrosine or phenylalanine at position 130, asparagine or tyrosine at position 131, asparagine, tyrosine, or phenylalanine, preferably tyrosine, at position 132, and arginine or lysine at position 189 of SEQ ID NO:3 (Kouno et al., 2017, Nat. Comm, 8:15024, DOI: 10.1038/ncomms15024).

Dimerized ACDs (dACDs)

[0159] While APOBEC3A is typically found as a monomer, some variants form noncovalently associated dimers naturally in solution. Human APOBEC3A can form a homodimer via association of the so-called “dimerization interface” of the protein. (Bohn et al., 2015, Structure, 23(5): 903-911). The purpose of dimerization has not been explicitly elucidated, but it is thought to be related to separation of binding and catalysis functions to improve target specificity. (Bohn et al.). The inventors herein demonstrated that dimerization of an ACD to form a dimerized ACD (dACD) improved enzyme stability and processivity.

[0160] As described herein, the introduction of a selectivity-enhancing mutation, such as a mutation to a position functionally equivalent to D133, was found to reduce the thermal melting point of ACDs that also included a substitution mutation at Y130, Y132, or both Y130 and Y132. Stability of ACDs is considered desirable because of their use in workflows that denature double-stranded DNA, often via increasing temperature, salt concentration, or chemical denaturant concentration, or a combination thereof. TThe inventors found that dimerization of the ACDs increased the stability of altered APOBEC proteins, and, in addition the processivity of the enzyme. In addition, dimerization of a protein such as an ACD can increase the apparent local concentration of the enzyme, potentially increasing substrate turnover. The inventors found that producing dimerized altered cytidine deaminases provided beneficial properties over the monomers, as detailed more herein.

[0161] Provided herein are dimeric altered cytidine deaminases (dACDs). A dACD includes a first protein and a second protein, wherein at least one of the first protein and the second protein is an altered cytidine deaminase. In some embodiments, the first protein is an altered cytidine deaminase, and the second protein is an altered cytidine deaminase. In some embodiments, the first protein is an altered cytidine deaminase, and the second protein is a wild-type cytidine deaminase. In some embodiments, the first protein is a wild-type cytidine deaminase, and the second protein is an altered cytidine deaminase.

[0162] The term “dimer” includes molecules which contain more than one polypeptide linked together. The more than one polypeptide can be joined by disulfide bonds, ionic bonds, or hydrophobic interactions, or complexes of polypeptides that are joined together, covalently or noncovalently, as dimers. The term polypeptide refers to a linear organic polymer comprising a large number of amino-acid residues bonded together in a chain, forming part of (or the whole of) a protein molecule. The terms peptide, oligopeptide, and protein are all encompassed within the definition of polypeptide and these terms are used interchangeably. It should be understood that these terms do not connote a specific length of a polymer of amino acids, nor are they intended to imply or distinguish whether the polypeptide is produced using recombinant techniques, chemical or enzymatic synthesis, or is naturally occurring.

[0163] Typically, the first protein and the second protein are closely associated, and in one embodiment are covalently attached. Methods of covalently attaching a first and a second protein are described in greater detail herein. In some embodiments, however, the first protein and the second protein are associated via a strong noncovalent interaction such that they form a dimer in solution. In one such embodiment, the noncovalent interaction may be an interaction in which the dimer has aa KD of at most 1 μM.

[0164] The “first protein” of a dimeric protein typically refers to the N-terminal protein, and the “second protein” of a dimeric protein typically refers to the C-terminal protein.

[0165] Briefly, a dACD may include one or two ACDs having any amino acid sequence described herein. Different combinations of ACDs may be advantageous in different embodiments depending on the desired catalytic activity and reaction conditions. Various combinations of exemplary dACDs are described in greater detail herein.

[0166] In some embodiments, the dACD is a homodimer, meaning that the first altered cytidine deaminase has an amino acid sequence that is identical to the amino acid sequence of the second altered cytidine deaminase. The amino acid sequence of an altered cytidine deaminase does not include domains such as linkers and purification tags (e.g., 6×His). For example, a dACD including, from N-terminus to C-terminus, the amino acid sequence of SEQ ID NO:16, an amino acid linker (e.g., (G₄S)₂ linker), the amino acid sequence of SEQ ID NO:16, and a 6×His tag (i.e., HHHHHH, SEQ ID NO:200)) would be considered to be a homodimeric ACD.

[0167] In some embodiments, the dACD is a heterodimer. A heterodimer is a dimer comprising a first altered cytidine deaminase having an amino acid sequence that is not identical to the second altered cytidine deaminase.

[0168] In some embodiments, a heterodimeric ACD includes a first altered cytidine deaminase and a second altered cytidine deaminase, wherein the first altered cytidine deaminase and the second altered cytidine deaminase have the same selectivity. As is described herein, different amino acid sequences may give rise to the same substrate selectivity, particularly when the differences in amino acid sequence are in regions not related to substrate selectivity (e.g., regions related to stability). As is described herein, dimerization of an altered cytidine deaminase having a particular substrate preference may improve selectivity for that substrate. Additionally or alternatively, dimerization of an altered cytidine deaminase having a particular substrate preference may improve processivity for that substrate.

[0169] Alternatively, it may be desirable to provide a dimerized altered cytidine deaminase (dACD) wherein each cytidine deaminase has a different substrate preference. Such dimers may desirably expand the activity of a cytidine deaminase. For example, a dACD including a first altered cytidine deaminase preferring 5mC and a second altered cytidine deaminase preferring 5hmC may result in a dimer active on both 5hmC and 5mC. In some embodiments, a heterodimeric ACD includes a first altered cytidine deaminase having a first selectivity and a second altered cytidine deaminase having a second selectivity. For example, the first altered cytidine deaminase may prefer 5mC and the second altered cytidine deaminase may prefer 5mC and 5hmC (i.e. a 5mC-selective and 5hmC-selective activity, respectively).

[0170] In some embodiments, a dACD may include an altered cytidine deaminase and wild-type cytidine deaminase. For example, a heterodimeric ACD may include an altered cytidine deaminase and a wild-type cytidine deaminase. The altered cytidine deaminase may have an engineered substrate preference, such as a preference for 5mC, and the wild-type cytidine deaminase may have a wild-type substrate preference, such as a preference for both C and modified C, such as 5mC.

[0171] Interestingly, the inventors have found that in some embodiments, it is desirable for a dACD to include a catalytically inactive ACD. A catalytically inactive ACD may include any number of mutations in addition to one or more mutations to the active site of the enzyme. One example of a catalytically inactivating mutation is glutamate 72 to alanine (E72A/Q), C101A, C106A, or a combination thereof.

[0172] In some embodiments, a dACD includes an ACD having one or more point mutations that modify the substrate specificity of the ACD. In some embodiments, both of the ACDs of the dACD include one or more point mutations that modify the substrate specificity of the ACD. The first ACD and the second ACD may include the same mutations or different mutations. In preferred embodiments, the first and/or second ACD are 5mC and 5hmC preferring deaminases.

[0173] In one example, a point mutation that modifies the substrate specificity of the ACD may include mutation of an amino acid at a position functionally equivalent to tyrosine 130 (Y130). Additionally or alternatively, a point mutation that modifies the substrate specificity of the ACD may include mutation of an amino acid at a position functionally equivalent to tyrosine 132 (Y132). Mutation of Y130 and/or mutation of Y132 to alter the activity of an ACD are described in greater detail herein.

[0174] In some example, the first, second or both ACD can have one or more point mutations that increase the 5mC selectivity of the deaminase. For example, the ACD may include a mutation at Y130, Y132, and D133 (e.g., Y130X₁, Y132X₂, D133W/C, preferably D133W, where X₁ and X₂ is an amino acid different from wildtype, for example, X₁ is selected from A, G, F, H, Q, M, N, K, V, D, E, S, C, P, T, preferably X₁ is selected from A or S; X₂ is selected from R, H, K, Q, preferably, H; and X₃ is selected from W or C, preferably W. Thus, in one embodiment, the first, second or both 5-mC selective ACD comprises Y130A/Y132H/D133W. In some embodiments, the 5-mC selective ACD comprises Y130X/Y132X/D133W and further comprises one or more, two or more, three or more, four or more, five or more, six or more, seven or more, eight or more, nine or more, ten or more of the stability-enhancing alterations described herein. Suitable positions include those stability-enhancing alterations from Table 6 and stability-enhancing substitutions from Table 4 and 5 and can be combined in any number of combinations to provide improved stability. In some examples, the locations of amino acids in an APOBEC3A (SEQ ID NO:3) where substitution mutation result in increased stability include A112X, A126X, A139X, A148X, A185X, A192X, A59X, A87X, C106X, C161X, C171X, C34X, D145X, D156X, D163X, D167X, D177X, D180X, D41X, D77X, D85X, E109X, E116X, E138X, E157X, E38X, G105X, G108X, G188X, G25X, G27X, H119X, H11X, H16X, H182X, H29X, H51LX, I17X, I26X, I89X, K47X, K60X, L135X, L62X, L78X, M14X, M48X, N117X, N196X, N21X, N42X, P80X, Q115X, Q141X, Q169X, Q184X, R111X, R123X, R189X, R39X, R74X, R91X, S103X, S183X, S187X, S20X, S45X, T118X, T164X, T19X, T31X, T93X, V110X, V79X, L12X, D14X, T19X, G27X, R28X, E38X, F54X, H56X, N57X, Y67X, L73X, D77X, S81X, Y90X, I96X, S97X, C101X, F102X, W104X, C106X, A107X, L114X, V120X, L122X, R128X, Y136X, M142X, A146X, K159X, C161X, L186X, and any combination thereof where the position number designation is functionally equivalent to the position in a wild-type APOBEC3A (SEQ ID NO:3) and X is an amino acid substitution different from the wild-type amino acid at that position. As discussed above, one or more of these stabilizing mutations may be contemplated in combination. Specific examples of substitution mutations identified as stabilizing in different scaffolds are shown in Table 5.

[0175] In some examples, a dACD includes an ACD having one or more selectivity-enhancing alterations, including a mutation, a deletion, an insertion, or a combination thereof.

[0176] Examples of selectivity-enhancing alterations suitable for a dACD of the present disclosure provide 5mC and 5hmC-preferring dACDs (e.g., dACDs having an ACD comprising Y130X1/Y132X2 and D133X3 described herein, for example Y130A/Y132H/D133V). In some embodiments, a dACD includes one or more ACDs further having one or more stability-enhancing alterations, including a mutation, a deletion, an insertion, or a combination thereof. Examples of stability-enhancing mutations suitable for a dACD of the present disclosure are listed in Table 4. In some embodiments, a dACD includes an ACD having one or more stability-enhancing alterations that are deletions. Examples of stability-enhancing deletions suitable for a dACD of the present disclosure are listed in Table 6.

[0177] One or both of the cytidine deaminases of a dACD may include the same stability-enhancing mutations. In some embodiments, one or both of the cytidine deaminases of a dACD may include a combination of stability-enhancing alterations, including but not limited to the specific examples shown in Tables 4 and 5.

[0178] In some embodiments, a dACD includes an ACD having one or more mutations to the dimerization interface. The dimerization interface may be positions which may interact between the two dimers. For example, possible mutation to the dimerization interface includes mutation to a position functionally equivalent to H16, R28, K30, H56, or K60. Examples of mutations to the dimerization interface are listed in Table 9 below.

TABLE 9
Dimerization interface mutants.

| Residue | Mutation |
|---|---|
| H16 | A, L, W, D |
| R28 | A, V |
| K30 | A |
| H56 | A, R |
| K60 | A, P, G, R |

[0179] Using any method of protein conjugation or co-translation, one primary result of protein dimerization as it is described herein is the increased proximity between two altered cytidine deaminases. The distance between the two ACDs in the dimers described herein is typically less than 100 angstrom (Å), less than 90 Å, less than 80 Å, less than 70 Å, less than 60 Å, less than 50 Å, or less than 40 Å.

[0180] In embodiments wherein the first ACD and the second ACD are not covalently attached, formation of a dimer may be confirmed using molecular techniques to determine protein size, such as circular dichroism, and non-denaturing PAGE. A dACD will have a larger molecular weight than a monomeric ACD. A dACD will typically have a larger molecular diameter than a monomeric ACD.

[0181] A dACD of the present disclosure may be identified by its function. For example, a dACD of the present disclosure may exhibit greater thermostability than a comparable monomeric ACD. As it is used herein, a “comparable” monomeric ACD refers to an ACD having the amino acid sequence of one (or both, in the case of homodimers) of the cytidine deaminases of the dACD. In some embodiments, a dACD of the present disclosure has an increased thermal melting point than a comparable monomeric ACD. A dACD may have a melting temperature that is at least 1° C., at least 2° C., at least 3° C., at least 4° C., at least 5° C., or at least 6° C. compared to a monomeric ACD. A suitable method of determining the melting temperature of an ACD described herein is by fluorimetry (see Examples 2 and 5, describing determination of melting temperature of a monomeric ACD that could also be applied to a dACD).

[0182] In some embodiments, the dACD has a higher reaction efficiency on one or more substrates, such as cytidine, 5-methyl cytidine, or 5-hydroxymethyl cytidine compared to a monomeric ACD. Reaction efficiency may be measured using a NGS-based quantitative deamination assay (see Example 12).

[0183] In some embodiments, the dACD has a greater substrate preference as compared to a monomeric ACD.

[0184] While many possible heterodimeric altered cytidine deaminases are possible, several variants of interest will be prepared and measured. Table 10 describes dACD variants prepared in the backbone of SEQ ID NO:75 (see Example 12). The N-terminal ACD is catalytically inactive, either via introduction of E72 to A or via another inactivating mutation. 10209 Table 11 describes dACD variants prepared in the backbone of SEQ ID NO:75. The C-terminal ACD is catalytically inactive, either via introduction of E72 to A or via another inactivating mutation.

TABLE 10
Heterodimer altered cytidine deaminases
with an inactive N-terminus.

| N-term (inactive) | C-term (active) |
|---|---|
| A59/K60/61-68 | SEQ ID NO: 75 |
| Δ26-27 | SEQ ID NO: 75 |
| Δ104-105 | SEQ ID NO: 75 |
| A59/K60/61-68, Δ26-27 | SEQ ID NO: 75 |
| A59/K60/61-68, Δ104-105 | SEQ ID NO: 75 |
| A59/K60/61-68, Δ26-27, Δ104-105 | SEQ ID NO: 75 |
| Δ26-27, Δ104-105 | SEQ ID NO: 75 |
| Δ25-26 | SEQ ID NO: 75 |
| A59/K60/61-68, Δ25-26 | SEQ ID NO: 75 |
| A59/K60/61-68, Δ25-26, Δ104-105 | SEQ ID NO: 75 |
| Δ25-26, Δ104-105 | SEQ ID NO: 75 |
| Δ27-28 | SEQ ID NO: 75 |
| A59/K60/61-68, Δ27-28 | SEQ ID NO: 75 |
| A59/K60/61-68, Δ27-28, Δ104-105 | SEQ ID NO: 75 |
| Δ27-28, Δ104-105 | SEQ ID NO: 75 |
| Δ28-29 | SEQ ID NO: 75 |
| A59/K60/61-68, Δ28-29 | SEQ ID NO: 75 |
| A59/K60/61-68, Δ28-29, Δ104-105 | SEQ ID NO: 75 |
| Δ28-29, Δ104-105 | SEQ ID NO: 75 |
| Δ29-30 | SEQ ID NO: 75 |
| A59/K60/61-68, Δ29-30 | SEQ ID NO: 75 |
| A59/K60/61-68, Δ29-30, Δ104-105 | SEQ ID NO: 75 |
| Δ29-30, Δ104-105 | SEQ ID NO: 75 |
| Σ24-31: VRWAKGRRE | SEQ ID NO: 75 |
| Σ24-31: EPWRGRHE | SEQ ID NO: 75 |
| Σ24-39: KRRLRRPYYPRKAL | SEQ ID NO: 75 |
| Σ24-31: VRWAKGRRE, | SEQ ID NO: 75 |
| A59/K60/61-68, Δ104-105 | |
| Σ24-31: EPWRGRHE, Δ59/K60/61- | SEQ ID NO: 75 |
| 68, Δ104-105 | |
| Σ24-39: KRRLRRPYYPRKAL, | SEQ ID NO: 75 |
| A59/K60/61-68, Δ104-105 | |
| Σ24-31: VRWAKGRRE, Δ104-105 | SEQ ID NO: 75 |
| Σ24-31: EPWRGRHE, Δ104-105 | SEQ ID NO: 75 |
| Σ24-39: KRRLRRPYYPRKAL, | SEQ ID NO: 75 |
| Δ104-105 | |

A59/K60/61-68 = Reversion of A59P/K60R to A59 and K60, reintroduction of WT 61-68 loop.

TABLE 11
Heterodimer altered cysteine deaminases
with an inactive C-terminus.

| N-term (active) | C-term (inactive) |
|---|---|
| SEQ ID NO: 75 | A59/K60/61-68 |
| SEQ ID NO: 75 | Δ26-27 |
| SEQ ID NO: 75 | Δ104-105 |
| SEQ ID NO: 75 | A59/K60/61-68, Δ26-27 |
| SEQ ID NO: 75 | A59/K60/61-68, Δ104-105 |
| SEQ ID NO: 75 | A59/K60/61-68, Δ26-27, Δ104-105 |
| SEQ ID NO: 75 | Δ26-27, Δ104-105 |
| SEQ ID NO: 75 | Δ25-26 |
| SEQ ID NO: 75 | A59/K60/61-68, Δ25-26 |
| SEQ ID NO: 75 | A59/K60/61-68, Δ25-26, Δ104-105 |
| SEQ ID NO: 75 | Δ25-26, Δ104-105 |
| SEQ ID NO: 75 | Δ27-28 |
| SEQ ID NO: 75 | A59/K60/61-68, Δ27-28 |
| SEQ ID NO: 75 | A59/K60/61-68, Δ27-28, Δ104-105 |
| SEQ ID NO: 75 | Δ27-28, Δ104-105 |
| SEQ ID NO: 75 | Δ28-29 |
| SEQ ID NO: 75 | A59/K60/61-68, Δ28-29 |
| SEQ ID NO: 75 | A59/K60/61-68, Δ28-29, Δ104-105 |
| SEQ ID NO: 75 | Δ28-29, Δ104-105 |
| SEQ ID NO: 75 | Δ29-30 |
| SEQ ID NO: 75 | A59/K60/61-68, Δ29-30 |
| SEQ ID NO: 75 | A59/K60/61-68, Δ29-30, Δ104-105 |
| SEQ ID NO: 75 | Δ29-30, Δ104-105 |
| SEQ ID NO: 75 | Σ24-31: VRWAKGRRE |
| SEQ ID NO: 75 | Σ24-31: EPWRGRHE |
| SEQ ID NO: 75 | Σ24-39: KRRLRRPYYPRKAL |
| SEQ ID NO: 75 | Σ24-31: VRWAKGRRE, A59/K60/61- |
| | 68, Δ104-105 |
| SEQ ID NO: 75 | Σ24-31: EPWRGRHE, A59/K60/61-68, |
| | Δ104-105 |
| SEQ ID NO: 75 | Σ24-39: KRRLRRPYYPRKAL, |
| | A59/K60/61-68, Δ104-105 |
| SEQ ID NO: 75 | Σ24-31: VRWAKGRRE, Δ104-105 |
| SEQ ID NO: 75 | Σ24-31: EPWRGRHE, Δ104-105 |
| SEQ ID NO: 75 | Σ24-39: KRRLRRPYYPRKAL, Δ104-105 |

A59/K60/61-68 = Reversion of A59P/K60R to A59 and K60, reintroduction of WT 61-68 loop

### Fusion Proteins

[0185] In some embodiments, the dACD includes a fusion protein including an ACD. As it is used herein, a “fusion protein” describes a contiguously translated amino acid sequence including the amino acid sequences of more than one protein. In some embodiments, a fusion protein including an ACD includes a ACD covalently attached to a second cytidine deaminase.

[0186] Typically, one or both of the cytidine deaminases are ACDs. However, in some embodiments, one of the cytidine deaminases is a wild-type cytidine deaminase.

[0187] A fusion protein including a dACD may include one or more linkers. In particular, a fusion protein may include an amino acid linker between the first cytidine deaminase and the second cytidine deaminase. The properties of the amino acid linker can be used to control the interaction between the first and second cytidine deaminases.

[0188] In some embodiments, the dACD includes a flexible linker. Typically, flexible amino acid linkers include amino acids having relatively small side chains. Flexible linkers can provide a certain degree of movement or interaction giving the two ACD domains flexibility. Regarding the amino acid composition of the linkers, peptides are selected that do not interfere with the dimerization of the two polypeptides. For example, linkers comprising glycine and serine residues generally provide protease resistance. The amino acid sequence of the linkers can be optimized, for example, by phage-display methods.

[0189] Flexible linkers most commonly can be composed of small, non-polar (e.g., Gly) or polar (e.g., Ser or Thr) amino acids. A flexible linker can have sequences consisting primarily of stretches of Gly and Ser residues (“GS” linker). A non-limiting example of a flexible linker can have the sequence of (G₄S)n (G₄(SG₄)₁ shown in SEQ ID NO:261), (SG₄)n (SEQ ID NO:262), G₄(SG₄)n (SEQ ID NO:263), wherein n can be 1-10, preferably wherein n is 1, 2, 3, 4, 5, 6, 7, 8, 9, or 10. By adjusting the copy number “n”, the length of this exemplary GS linker can be optimized to achieve appropriate separation of functional domains, or to maintain necessary inter-domain interactions. Other GS linkers include, but are not limited to, (GGSGGS)n (SEQ ID NO:260), (GGSG)n, or (GGSGG)n (SEQ ID NO:219), wherein n is 1-10, preferably wherein n can be 1, 2, 3, 4, 5, 6, 7, 8, 9,or 10.

[0190] Besides GS linkers, other flexible linkers can be utilized for dimers. In some embodiment, a flexible linker can have the sequence of (Gly)n, wherein n can be 6, 7, or 8. In some cases, flexible linkers can also be rich in small or polar amino acids such as Gly and Ser, but can contain additional amino acids such as Thr and Ala to maintain flexibility. In other cases, polar amino acids such as Lys and Glu can be used to improve solubility. Thus, other suitable linkers may include, for example, GERP/GEKP/GQRP/GQKP or those disclosed in WO99/45132. For example, other linkers include, but are not limited to, GSPGSSSSGS (SEQ ID NO:235), DPGGGGSGGGGSNPGS (SEQ ID NO:236), GGGGSGGGGSGSDPGS (SEQ ID NO:237), DPGSGGGGSGGGGSGS (SEQ ID NO:238), GGGGSGGGGSGGGGSDPGS (SEQ ID NO:239), DPGSGGGGSGGGGSGGGGS (SEQ ID NO:240), DPGSGSVPLGSGSNPGS (SEQ ID NO:241), DPGSGGSVPLGSGGSNPGS (SEQ ID NO:242), DPGVLEREDKPTTSKPNPGS (SEQ ID NO:243), DPGVLEREDVPTTSYPNPGS (SEQ ID NO:244), DPGVLEREDKVTTSKYNPGS (SEQ ID NO:245), DPVLEREDKVTTSKNPGS (SEQ ID NO:246), DIEGRMD (SEQ ID NO:247), GEGKSSGSGSESKAS (SEQ ID NO:248),GSTSGSGKPGSGEGSTKG (SEQ ID NO:249), GGGGSGGGGS (SEQ ID NO:267), SGGGGSGGGG (SEQ ID NO:250), GGGGSGGGGSGGGG (SEQ ID NO:251), GSPGSSSSGS (SEQ ID NO:235), GGGGSGGGGSGGGGSGGGGS (SEQ ID NO:253), GSGSGNGS (SEQ ID NO:254), GGSGSGSG (SEQ ID NO:255), GGSGSG (SEQ ID NO:256), GGSG, GGSGNGSG (SEQ ID NO:257), GGNGSGSG (SEQ ID NO:258), and GGNGSGA(EAAAK)₄ALEA(EAAAK)₄A, (EAAAK)n (SEQ ID NO:259), n=1-6, among others.

[0191] In some embodiments, the protein linker includes the amino acid sequence:

(SEQ ID NO: 266)
DSGGSSGGSSGSETPGTSESATPESSGGSSGGS.

[0192] In some embodiments, the protein linker includes the amino acid sequence:

(SEQ ID NO: 267)
GGGGSGGGGS.

[0193] In some embodiments, the protein inker includes the amino acid sequence:

(SEQ ID NO: 268)
KESGSVSSEQLAQFRSLD.

[0194] In some embodiments, the protein linker includes the amino acid sequence:

(SEQ ID NO: 264)
EGKSSGSGESKST.

[0195] In some embodiments, the protein linker includes the amino acid sequence:

(SEQ ID NO: 269)
GSAGSAAGSGEF.

[0196] In some embodiments, the protein linker is a rigid linker. Rigid linkers may advantageously improve catalytic activity in some embodiments. Some rigid linkers form alpha helices. An example of a rigid linker that forms an alpha helix is the amino acid sequence A(EAAAK)n, wherein n is typically 2, 3, 4, or 5 (SEQ ID NO:252). Some rigid linkers include a high percent composition of proline.

[0197] A fusion protein may include one or more additional amino acid sequences to confer additional properties to the fusion protein. For example, a fusion protein may include an affinity tag for protein purification, such as a His-tag (e.g., a 6×His, SEQ ID NO:220) or a FLAG™ tag (SEQ ID NO:218).

### Bioconjugation Protein Domains

[0198] In some embodiments, the fusion protein includes a first protein including a first dimerization domain and a first altered cytidine deaminase and a second protein including a second dimerization domain and a second altered cytidine deaminase.

[0199] In some embodiments, the dACD includes a first fusion protein including a first ACD including a first protein dimerization domain. The dACD may include a second fusion protein including a second ACD including a second protein dimerization domain.

[0200] The dimerization domain may include the proteins of the SpyCatcher/SpyTag™ (SEQ ID NOs:226-227) dimerization pair. (Zakeri et al. 2012, Proc Natl Acad Sci 109(12) E690-E697). To use this dimerization pair, the first ACD can be attached to SpyCatcher and the second ACD can be attached to SpyTag. Preferably, the first ACD is provided as a first fusion protein with SpyCatcher and the second ACD is provided as a second fusion protein with SpyTag. When the first fusion protein and the second fusion protein are mixed under physiological conditions, SpyTag and SpyCatcher form an isopeptide bond, covalently linking the first ACD to the second ACD. Advantageously, SpyTag and SpyCatcher may be fused to either terminus or between the termini of a protein, such as an ACD. Similar systems of proteins that form a strong covalent bond and can be used to create a covalent dimer of two proteins such as ACDs are known to the art. Examples of such proteins include the SnoopCatcher/SnoopTag system (SEQ ID NOs:228-229).

[0201] Similar bioconjugation pairs exist that do not form covalent bonds, but strongly associate two proteins via their interaction. Examples of such bioconjugation pairs include GFP1-10 (SEQ ID NO:230) and GFP11 (SEQ ID NO:231), LgBit/HiBit™ (SEQ ID NOs:232-233), leucine zippers (SEQ ID NO:234), and the Avi-tag™ (SEQ ID NO:212).

### Chemical Linkage

[0202] In some embodiments, the dACD includes more than one cytidine deaminase attached via a chemical linkage. In some such embodiments, a first protein may include a first cytidine deaminase and a second protein may include a second cytidine deaminase. The first protein may be expressed separately from the second protein. One or both of the first cytidine deaminase and the second cytidine deaminase may include an ACD. Methods of conjugating a first cytidine deaminase and a second cytidine deaminase to form a dACD are described in greater detail herein.

Polynucleotides Encoding ACDs and dACDs

[0203] ACDs described herein also may be identified in terms of the polynucleotide that encodes the protein. Thus, this disclosure provides polynucleotides that encode an ACD described herein or hybridize, under standard hybridization conditions, to a polynucleotide that encodes an ACD described herein, and the complements of such polynucleotide sequences.

[0204] A polynucleotide as described herein can include any polynucleotide that encodes an ACD of the present disclosure. Thus, the nucleotide sequence of the polynucleotide may be deduced from the amino acid sequence that is to be encoded by the polynucleotide. An ACD can be encoded by multiple codons, and certain translation systems (e.g., prokaryotic or eukaryotic cells) often exhibit codon bias, e.g., different organisms often prefer one of the several synonymous codons that encode the same amino acid. As such, polynucleotides presented herein are optionally “codon optimized,” meaning that the polynucleotides are synthesized to include codons that are preferred by the particular translation system being employed to express the protein. For example, when it is desirable to express the protein in a bacterial cell (or even a particular strain of bacteria), the polynucleotide can be synthesized to include codons most frequently found in the genome of that bacterial cell, for efficient expression of the ACD. A similar strategy can be employed when it is desirable to express the ACD in a eukaryotic cell, e.g., the nucleic acid can include codons preferred by that eukaryotic cell.

[0205] A polynucleotide described herein may also, advantageously, be included in a suitable expression vector to express the ACD encoded therefrom in a suitable host. Incorporation of cloned DNA into a suitable expression vector for subsequent transformation of a host cell and subsequent selection of the transformed cells is well known to those skilled in the art as provided in Sambrook et al. (1989), Molecular cloning: A Laboratory Manual, Cold Spring Harbor Laboratory. Suitable host cells include, but are not limited to, E. coli and S. cerevisiae.

[0206] Such an expression vector includes a vector having a polynucleotide described herein operably linked to heterologous regulatory sequences, such as promoter regions, that are capable of effecting expression of said DNA fragments. The term “operably linked” refers to a juxtaposition wherein the components described are in a relationship permitting them to function in their intended manner. Such vectors may be transformed into a suitable host cell to provide for the expression of an altered cytidine deaminase.

[0207] The nucleic acid molecule may encode a mature protein or a protein having a pro-sequence, including that encoding a leader sequence on the preprotein which is then cleaved by the host cell to form a mature protein. The vectors may be, for example, plasmid, virus or phage vectors provided with an origin of replication, and optionally a promoter for the expression of said nucleotide and optionally a regulator of the promoter. The vectors may contain one or more selectable markers, such as, for example, an antibiotic resistance gene.

[0208] Regulatory elements required for expression include promoter sequences to bind RNA polymerase and to direct an appropriate level of transcription initiation and also translation initiation sequences for ribosome binding. For example, a bacterial expression vector may include a promoter such as the lac promoter and for translation initiation the Shine-Dalgarno sequence and the start codon AUG. Similarly, a eukaryotic expression vector may include a heterologous or homologous promoter for RNA polymerase II, a downstream polyadenylation signal, the start codon AUG, and a termination codon for detachment of the ribosome. Such vectors may be obtained commercially or be assembled from the sequences described by methods well known in the art.

[0209] Transcription of DNA encoding an ACD may be optimized by including an enhancer sequence in the vector. Enhancers are cis-acting elements of DNA that act on a promoter to increase the level of transcription. Vectors will also generally include origins of replication in addition to the selectable markers. Making and isolating ACDs and dACDs.

[0210] Generally, polynucleotides encoding an ACD as presented herein can be made by cloning, recombination, in vitro synthesis, in vitro amplification and/or other available methods. A variety of recombinant methods can be used for expressing an expression vector that encodes an ACD presented herein. Methods for making recombinant polynucleotides, expression, and isolation of expressed products are well known and described in the art.

[0211] Polynucleotides encoding wild-type cytidine deaminases can be obtained from a source and subjected to mutagenesis to introduce one or more substitution mutations described herein. In general, any available mutagenesis procedure can be used for making an ACD described herein. Procedures that can be used include, but are not limited to: site-directed point mutagenesis, in vitro or in vivo homologous recombination, oligonucleotide-directed mutagenesis, mutagenesis by total gene synthesis, and many others known to persons skilled in the art.

[0212] Additional useful references for mutation, recombinant, and in vitro nucleic acid manipulation methods (including cloning, expression, PCR, and the like) include Berger and Kimmel, Guide to Molecular Cloning Techniques, Methods in Enzymology volume 152 Academic Press, Inc., San Diego, Calif. (Berger); Kaufman et al. (2003) Handbook of Molecular and Cellular Methods in Biology and Medicine Second Edition Ceske (ed) CRC Press (Kaufman); The Nucleic Acid Protocols Handbook Ralph Rapley (ed) (2000) Cold Spring Harbor, Humana Press Inc (Rapley); Chen et al. (ed) PCR Cloning Protocols, Second Edition (Methods in Molecular Biology, volume 192) Humana Press; and in Viljoen et al. (2005) Molecular Diagnostic PCR Handbook Springer, ISBN 1402034032.

[0213] In addition, many kits are commercially available for the purification of plasmids or other relevant nucleic acids from cells. An isolated polynucleotide can be further manipulated to produce other polynucleotides, used to transfect or transform cells, incorporated into related vectors and introduced into cells for expression, and/or the like. Typical cloning vectors contain transcription and translation terminators, transcription and translation initiation sequences, and promoters useful for regulation of the expression of the particular target nucleic acid. The vectors optionally include generic expression cassettes containing at least one independent terminator sequence, sequences permitting replication of the cassette in eukaryotes, or prokaryotes, or both, (e.g., shuttle vectors) and selection markers for both prokaryotic and eukaryotic systems. Vectors are suitable for replication and integration in prokaryotes, eukaryotes, or both.

[0214] Other useful references, e.g., for cell isolation and culture (e.g., for subsequent nucleic acid isolation) include Freshney (1994) Culture of Animal Cells, a Manual of Basic Technique, third edition, Wiley-Liss, New York and the references cited therein; Payne et al. (1992) Plant Cell and Tissue Culture in Liquid Systems John Wiley & Sons, Inc. New York, N.Y.; Gamborg and Phillips (eds) (1995) Plant Cell, Tissue and Organ Culture; Fundamental Methods Springer Lab Manual, Springer-Verlag (Berlin Heidelberg New York); and Atlas and Parks (eds) The Handbook of Microbiological Media (1993) CRC Press, Boca Raton, Fla. Construction of vectors containing a nucleic acid encoding an ACD described herein employs standard ligation techniques known in the art. See, e.g., Sambrook et al, Molecular Cloning: A Laboratory Manual., Cold Spring Harbor Laboratory Press (1989) or Ausubel, R. M., ed. Current Protocols in Molecular Biology (1994).

[0215] A variety of protein isolation and detection methods are known and can be used to isolate an ACD, e.g., from recombinant cultures of cells expressing the recombinant cytidine deaminase presented herein. A variety of protein isolation and detection methods are well known in the art, including, e.g., those set forth in R. Scopes, Protein Purification, Springer-Verlag, N.Y. (1982); Deutscher, Methods in Enzymology Vol. 182: Guide to Protein Purification, Academic Press, Inc. N.Y. (1990); Sandana (1997) Bioseparation of Proteins, Academic Press, Inc.; Bollag et al. (1996) Protein Methods, 2nd Edition Wiley-Liss, NY; Walker (1996) The Protein Protocols Handbook Humana Press, NJ, Harris and Angal (1990) Protein Purification Applications: A Practical Approach IRL Press at Oxford, Oxford, England; Harris and Angal Protein Purification Methods: A Practical Approach IRL Press at Oxford, Oxford, England; Scopes (1993) Protein Purification: Principles and Practice 3rd Edition Springer Verlag, NY; Janson and Ryden (1998) Protein Purification: Principles, High Resolution Methods and Applications, Second Edition Wiley-VCH, NY; and Walker (1998) Protein Protocols on CD-ROM Humana Press, NJ; and the references cited therein. Additional details regarding protein purification and detection methods can be found in Satinder Ahuja ed., Handbook of Bioseparations, Academic Press (2000).

[0216] One method of producing fusion proteins, such as dACDs, is cotranslation of the two proteins from a single open reading frame. Using this method, a nucleic acid is provided that encodes the first monomer and the second monomer in the same open reading frame, typically attached from N-terminus to C-terminus. Typically, a protein linker is included between the first and second proteins. The protein linker is translated simultaneously with the first and second proteins, resulting in an amino acid sequence including the first protein's amino acid sequence, the sequence of the linker, and the second protein's amino acid sequence. Sequences of suitable amino acid linkers are described in greater detail herein.

[0217] In some embodiments, a dACD includes a protein linker between the first and the second cytidine deaminase. The protein linker may have any suitable sequence. Typically, the protein linker includes 5 to 50 amino acids, such as 10 to 40 amino acids or 20 to 35 amino acids. In some preferred embodiments, the protein linker includes 32 amino acids.

[0218] An ACD protein or polynucleotide can be isolated. An “isolated” protein or polynucleotide is one that has been removed from a cell. For instance, an isolated protein is a polypeptide that has been removed from the cytoplasm or from the membrane of a cell, and many of the proteins, nucleic acids, and other cellular material of its natural environment are no longer present. Proteins that are produced outside of a cell, e.g., through chemical or recombinant means, are considered to be isolated by definition, as they were never present in a cell.

### Chemical Conjugation

[0219] In some embodiments, a dACD is prepared by chemically conjugating a first cytidine deaminase to a second cytidine deaminase. Prior to conjugation, the first cytidine deaminase and the second cytidine deaminase may include a pair of cooperative reactive handles. Following conjugation, the conjugated dACD may include the reaction product of the pair of cooperative reactive handles.

[0220] Cooperative handles are two or more reactive handles (Rh) that, when exposed to each other under favorable reaction conditions, undergo a conjugation reaction to form a reaction product between the reactive handles. Any pair of cooperative reactive handles may be used to form the conjugates. Examples of cooperative handles include an activated ester and an amine; an amine and an NHS-ester; a hydroxyl and an NHS-ester; a hydroxyl and an epoxide; an acyl chloride and an amine; an acyl chloride and an alcohol; an amine and an epoxide; a thiol and an epoxide; a thiol and a maleimide; a disulfide and a thiol; an azide and an alkyne (azide and a linear alkyne in the presence of Cu(I); an azide and a cyclic alkyne such as cyclooctyne, difluorinated cyclooctyne, dibenxocyclooctyne, TMTH-SulfoxImine, biarylazacyclooctynone, aryl-less cyclooctyne, or bicyclo[6.1.0]nonyne); an amine and an isocyanate; an amine and an isothiocyanate, a amine and a benzoyl fluoride; a thiol and a iodoacetamide; a thiol and a bromoacetamide; a disulfide and 2-thiopyridine; a thiol and 3-arylpropiolonitirle; a phenol and a diazonium salt; a phenol and 4-phenyl-1,2,4-triazoline-3,5-dione; a phenol and aldehyde, and a aniline; a hydroxyl and sodium periodate; a thiol and an iodoacetamide; an amine and a pyridoxal phosphate; an azide and a functionalized triphenyl phosphine; a tetrazine and a strained alkene; and the like.

[0221] Examples of individual reactive handles that may be used to form the conjugates include Rh^{A} (hydroxyl), Rh^{B} (thiol), Rh^{C} (amine), Rh^{D} (activated ester), Rh^{E} (azide), Rh^{F} (alkyne), Rh^{G} (NHS-ester), Rh^{H} (maleimide), Rh^{I} (2-haloacetamides, where a halo group is a -chloro, -bromo, or -iodo leaving group attached to carbon that can undergo nucleophilic substitution; e.g., a bromoacetamide or iodoacetamide), Rh^{J} (azadibenzocyclooctyne (ADIBO or DBCO or DIBAC)), Rh^{K} (isocyanate), Rh^{L} (isothiocyanate), Rh^{M} (alkylhalides, where halide is a -chloro, -bromo, or -iodo leaving group attached to carbon that can undergo nucleophilic substitution), Rh^{N} (an epoxide), Rh^{o} (an acyl chloride), Rh^{P} (an aldehyde) and isomers thereof. Chemical structures of Rh^{A}-Rh^{P} are depicted below.

[chemical structure]

[chemical structure]

X in Rh^{M} and Rh^{I} may be -choro, bromo, or -iodo.

[0222] Rh^{D} is an activated ester where AG is an activating group. An activated ester is an ester that is reactive with an activated ester cooperative reaction handle (e.g., an amine) in a conjugation reaction. Activated esters may be denoted as the type of activated ester or by the activating group. Examples of activating groups include O-acylisoureas, benzotriazoles (with a bond between the ester oxygen and one nitrogen of the triazole), and pentafluorophenyl or tetrafluorophenyl. In some embodiments, Rh^{D} may be an activated ester of a carboxylic acid. The activated ester can be formed through reaction of a carboxylic acid with one or more reagents that install the activating group. For example, a carboxylic acid may be converted into an activated ester having a O-acylisoureas activating group by treating the carboxylic acid with various carbodiimide reagents (e.g., N,N′-dicyclohexylcarbodiimide (DCC), 1-ethyl-3-(3-dimethylaminopropyl)carbodiimide (EDC), or diisopropylcarbodiimide (DIC)) under favorable reaction conditions. A carboxylic acid may be converted into an activated ester having a benzotriazole activating group by treating the carboxylic acid with various carbodiimide reagents followed by treatment with hydroxybenzotriazole (HOBT) or by treating the carboxylic acid with various benzotriazole containing compounds (e.g., O-(benzotriazol-1-yl)-N,N,N′,N′-tetramethyluronium hexafluorophosphate or 2-(1H-benzotriazol-1-yl)-1,1,3,3-tetramethyluronium hexafluorophosphate (HBTU); O-(benzotriazol-1-yl)-N,N,N′,N′-tetramethyluronium tetrafluoroborate (TBTU); benzotriazol-1-yloxy)tris(dimethylamino)phosphonium hexafluorophosphate (BOP); (benzotriazol-1-yloxy)tripyrrolidinophosphonium hexafluorophosphate (PyBOP); and O-(7-azabenzotriazol-1-yl)-N,N,N′,N′-tetramethyluronium tetrafluoroborate (TATU)) under favorable reaction conditions. Other reagents are available for making activated esters from carboxylic acids including bromotripyrrolidinophosphonium hexafluorophosphate (PyBrOP); O-(N-Succinimidyl)-1,1,3,3-tetramethyl-uronium tetrafluoroborate (TSTU); O-(5-Norbornene-2,3-dicarboximido)-N,N,N′,N′-tetramethyluronium tetrafluoroborate (TNTU); O-(1,2-Dihydro-2-oxo-1-pyridyl-N,N,N′,N′-tetramethyluronium tetrafluoroborate (TPTU); and 3-(diethylphosphoryloxy)-1,2,3-benzotriazin-4(3H)-one (DEPBT); carbonyldiimidazole (CDI). In some embodiments, the activated ester may be created in situ from a carboxylic acid and not isolated prior to a conjugation reaction.

[0223] Reactive handles Rh^{A}, Rh^{B}, Rh^{C}, Rh^{D}, Rh^{E}, Rh^{F}, Rh^{G}, Rh^{H}, Rh^{I}, Rh^{J}, Rh^{K}, Rh^{L}, Rh^{M}, Rh^{N}, Rh^{O}, and Rh^{P} include various pairs of cooperative handles that can form the reaction products of Rp^{A}, Rp^{B}, Rp^{C}, Rp^{D}, Rp^{E}, Rp^{F}, Rp^{G}, Rp^{H}, Rp^{I}, Rp^{J}, and Rp^{K} (shown below). Such reaction products may also be referred to as bonding groups (M, as disclosed herein). In some embodiments, the conjugates include one or more of the reaction products Rp^{A}, Rp^{B}, Rp^{C}, Rp^{D}, Rp^{E}, Rp^{F}, Rp^{G}, Rp^{H}, Rp^{I}, Rp^{J}, and Rp^{K}.

[chemical structure]

[0224] For example, under favorable reaction conditions, a conjugation reaction between Rh^{A} and Rh^{D} forms Rp^{A} where U⁰ is O. Under favorable reaction conditions, a conjugation reaction between Rh^{D} and Rh^{C} forms Rp^{A} where U⁰ is NH. Under favorable reaction conditions, a conjugation reaction between Rh^{C} and Rh^{G} forms Rp^{A} where U⁰ is NH. Under favorable reaction conditions, a conjugation reaction between Rh^{B} and Rh^{H} forms Rp^{C} where U⁴ is S. Under favorable reaction conditions, a conjugation reaction between two Rh^{B} forms Rp^{D}. Under favorable reaction conditions, a conjugation reaction between Rh^{C} and Rh^{I} forms Rp^{H} where U⁶ is NH. Under favorable reaction conditions, a conjugation reaction between Rh^{B} and Rh^{I} forms Rp^{H} where U⁶ is S. Under favorable reaction conditions, a conjugation reaction between Rh^{M} and Rh^{B} forms Rp^{E} where U⁵ is S. Under favorable reaction conditions, a conjugation reaction between Rh^{M} and Rh^{C} forms Rp^{E} where U⁵ is NH. Under favorable reaction conditions, a conjugation reaction between Rh^{N} and Rh^{C} forms Rp^{B} where U¹ and U³ are NH and U² is O. Under favorable reaction conditions, a conjugation reaction between Rh^{L} and Rh^{C} forms Rp^{B}where U¹ and U³ are NH and U² is S. Under favorable reaction conditions, a conjugation reaction between Rh^{F} and Rh^{E} forms Rp^{F}. Under favorable reaction conditions, a conjugation reaction between Rh^{J} and Rh^{E} forms Rp^{G}. Under favorable reaction conditions, a conjugation reaction between Rh^{N} and Rh^{A} forms Rp^{I} or Rp^{J} where U⁷ is O. Under favorable reaction conditions, a conjugation reaction between Rh^{N} and Rh^{B} forms Rp^{I} or Rp^{J} where U⁷ is S. Under favorable reaction conditions, a conjugation reaction between Rh^{N} and Rh^{C} forms Rp^{I} or Rp^{J} where U⁷ is N. Under favorable reaction conditions, a conjugation reaction between Rh^{o} and Rh^{A} forms Rp^{A} where U⁰ is O. Under favorable reaction conditions, a conjugation reaction between Rh^{o} and Rh^{B}forms Rp^{A} where U⁰ is NH. Under favorable reaction conditions, a conjugation reaction between Rh^{P} and Rh^{C} forms Rp^{K}.

[0225] In some embodiments, the first cytidine deaminase includes one or more of the reactive handles disclosed herein capable of forming one or more of the reaction products disclosed herein. In some embodiments, the second cytidine deaminase includes one or more reactive handles disclosed herein capable of reaction with the reactive handle of a first cytidine deaminase disclosed herein to form a conjugate comprising a dACD disclosed herein.

[0226] In some embodiments, a first cytidine deaminase is conjugated to a second cytidine deaminase through a direct conjugation reaction. A direct conjugation reaction is a reaction in which the two components that are being covalently linked have the proper cooperative functional handles without the need for an intermediary bifunctional bioconjugation compound. Direct bioconjugation reactions can be accomplished using any suitable cooperative reaction handles, such as any of the cooperative functional handles disclosed herein, to result in the reaction products disclosed herein.

[0227] In some embodiments, a first cytidine deaminase is conjugated to a second cytidine deaminase using a bifunctional conjugation compound in an indirect bioconjugation reaction. An indirect bioconjugation reaction is the conjugation of two components through an intermediary bifunctional conjugation compound. A bifunctional conjugation compound includes a first reactive handle and a second reactive handle that are configured to react with cooperative functional handles on the components to be conjugated. Examples of pairs of reactive handles on a bifunctional bioconjugation compound include NHS-ester and an alkyne, a maleimide and an NHS-ester, an NHS ester and a disulfide, a dibenzocyclooctyne (DBCO) and an NHS ester, DBCO and a tetrafluophenyl ester, and the like. Indirect conjugation reactions often include two consecutive conjugation reactions; a first conjugation reaction to attach a first component to the bifunctional conjugation compound and a second conjugation reaction to attach the second component to the bifunctional conjugation compound. Generally, the two conjugation reactions are orthogonal. The first component has a reactive handle that is cooperative with a first reactive handle on the bifunctional conjugation compound, and the second component has a reactive handle that is cooperative with a second reactive handle on the bifunctional conjugation compound. Generally, the two pairs of cooperative functional handles allow for orthogonal conjugation reactions. Any conjugation chemistry and any two pairs of cooperative functional handles, such as cooperative reaction handles described herein, may be used. In some embodiments, where a delivery construct is conjugated to a cargo through a bifunctional conjugation compound, the bonding group (M) connecting the two components includes the reaction products of the two conjugation reactions and any chemical group of the bifunctional bioconjugation compound that separates the two reactive handles of the bifunctional bioconjugation compound.

### Methods of Use

[0228] The ACDs and dACDs provided by the present disclosure can be easily integrated into essentially any application for identifying modified cytosines. For instance, ACDs and dACDs can be integrated into applications that include sequencing library preparation. Examples of sequencing library preparation include, but are not limited to, whole genome, accessible (e.g., ATAC), conformational state (e.g., HiC), and reduced representation bisulfite sequencing (RRBS). It can be particularly useful in essentially any application using low input DNA or RNA such as, but not limited to, cell free DNA-based methods and single cell combinatorial indexing (sci) methods like sci-WGS-seq, sci-MET-seq, and sci-ATAC-seq, and sci-RNA-seq.

[0229] Specific applications include, but are not limited to, identifying one or more patterns of cytosine modification such as determining methylation on CpG islands and reduced representation bisulfite sequencing (RRBS); variant calling, including SNV/indel, copy number variation (CNV), short tandem repeats (STR), and structural variants (SV); detecting differentially methylated regions (DMRs); measuring methylation at promoters; and detecting tumor DNA (International Application No. PCT/US2023/017846).

[0230] The ACDs provided by the present disclosure can be easily integrated into essentially any application that includes locus-specific methylation profiling. Typical locus-specific detection of epigenetic methylated cytosines, such as 5mC, require the use of 5mC-specific antibodies, or multi-step chemical or chemoenzymatic transformations that lead to deamination of C or 5mC to U/T to enable differentiation of the two C-isoforms. When combined with various in vitro detection methodologies, these approaches can be strong approaches to detect 5mC at defined loci. However, these methods can be confounded by antibody cross-reactivity and stability, or the toxicity and complex workflows required by chemical and chemoenzymatic approaches. Use of an ACD described herein in an enzymatic deamination protocol permits selective conversion and identification of the methylation status of cytosine, e.g., 5mC, 5hmC, or unmodified C that is compatible with a number of in vitro diagnostic modalities, resulting in locus-specific detection of 5hmC.

[0231] Instead of using destructive methods for identifying methylated cytosines, integrating the ACDs provided by the present disclosure into methods for identifying modified cytosines, such as sequencing library production and locus-specific methylation profiling, results in the more efficient enzyme-catalyzed conversion of modified cytosines during generation of target nucleic acids, thereby permitting better sequencing data and better retention of genetic information, which is demonstrated by high variant calling performance (International Application No. PCT/US2023/017846). Furthermore, as an enzymatic method for conversion, the use of the ACDs enables high coverage uniformity and low sample damage, which results in lower nucleic acid input requirements. A multitude of sequencing library methods are known to a skilled person that can be used in the construction of whole-genome or targeted libraries.

[0232] Use of an ACD or dACD described herein in a single enzymatic deamination protocol permits selective identification of 5hmC that is compatible with a number of in vitro diagnostic modalities, resulting in locus-specific detection of 5mC. Alternatively, multiples of the ACDs and/or dACDs of the present disclosure can be used in parallel to determine multiple types of methylated cytosines in a single sample. For example, an ACD or dACD having activity toward 5mC and 5hmC can be used to detect presence of both 5mC and 5hmC in a first aliquot of a sample. If the sample is treated with only this ACD or dACD, one can determine that one of the two modified bases is present at a given locus. However, if a second aliquot of the sample is treated in parallel with an ACD or dACD having activity toward 5mC only, the results of sequencing the first aliquot of the sample and the second aliquot of the sample can be compared to further distinguish 5mC from 5hmC.

[0233] In general, methods for using an ACD of the present disclosure include contacting target nucleic acids, e.g., DNA or RNA, with the enzyme, under conditions suitable for conversion of modified cytidines. Because amplification of DNA does not preserve the modification status of cytidine (e.g., the methylation status of 5mC and 5hmC is not retained), use of an ACD typically occurs before amplification of target DNA. Target nucleic acids can be contacted with an ACD at essentially any time in a method before an amplification, provided the DNA is single-stranded. For instance, target nucleic acids can be contacted with an ACD while the nucleic acids are inside a fixed or unfixed cell or nucleus, after isolation of genomic or cell free DNA or mRNA, before or after fragmentation, or before or after tagmentation. The skilled person will recognize that target nucleic acids can be contacted with ACD after addition of a universal sequence and/or an adapter, provided the universal sequence and/or an adapter is not added by amplification.

[0234] A method for using an ACD can include the optional step of comparison of the treated target nucleic acid with an untreated nucleic acid or comparison of the treated target nucleic acid with a nucleic acid treated with a wild-type cytidine deaminase. For instance, in embodiments where the treated nucleic acid is sequenced, the sequence can be compared to a reference sequence thereby permitting easy identification of point mutations and inference of modified cytosines. Thus, in embodiments where an ACD having 5hmC-preferring activity is used, the presence of C to T point mutations can be easily identified, and the point mutations are inferred as 5hmC positions. In embodiments where the treated nucleic acid is not sequenced, the nucleic acid can be treated with an ACD and compared to the nucleic acid that is untreated, i.e., not contacted with an ACD. Here the read-out typically depends on the assay method, for instance when an amplification is used the relative amounts of amplification can be easily identified and the presence or absence of a 5hmC or a pattern of cytosine modification at a predetermined sequence inferred (International Application No. PCT/US2023/017846).

[0235] Reaction conditions suitable for conversion of modified cytidines, such as conversion of 5mC to T and/or 5hmC to 5hmU, by an ACD described herein include, but are not limited to, a substrate of target nucleic acid that is single-stranded (ss) DNA or RNA suspected of including at least one modified cytidine, buffer, pH, temperature of the reaction, time of the reaction, and concentration of the ACD and/or ss DNA or RNA substrate. In one embodiment, double-stranded (ds) DNA can be denatured and exposed to an ACD. Methods for denaturing dsDNA are known and routine, and include heat treatment, chemical treatment, such as NaOH, formamide, DMSO, or N, N-dimethylformamide (DMF), or a combination thereof.

[0236] Target nucleic acids useful in the methods of the present disclosure are described herein. A modified cytidine present on a substrate single-stranded (ss) DNA or RNA includes, but is not limited to, 5mC), 5hmC), 5-formyl cytosine (5fC), and 5-carboxy cytosine (5CaC). In one embodiment, the modified cytidine is 5hmC. Methods that use double stranded target DNA for generating a sequencing library can be modified to include denaturation to convert the double stranded target DNA to ssDNA. In some embodiments, dsDNA that is used in a tagmentation reaction or for adapter attachment can be denatured and then treated with an ACD. Conditions for denaturation are known and routine. In those embodiments where ssDNA is contacted with an ACD and subsequently used in a process that requires dsDNA, e.g., addition of universal adapters by tagmentation or ligation, the ssDNA can be converted to dsDNA using routine methods.

[0237] In some embodiments, an ACD or dACD as presented herein can be used to differentiate between 5-methyl cytosine (5mC) and 5-hydroxymethyl cytosine (5hmC). In such an embodiment, a sample of DNA suspected of including single-stranded DNA comprising at least one 5-methyl cytosine (5mC) or 5-hydroxymethyl cytosine (5hmC) is modified to prevent an ACD from converting 5hmC to thymidine. Methods for blocking deaminase activity are known in the art, and any one of a number of methods can be used to protect 5hmC from deaminase activity. As one example, target DNA can be treated to modify 5hmC but not 5mC such that 5hmC is an unsuitable substrate for cytidine deaminase activity. In a specific example, a glucosyltransferase enzyme can be used to glucosylate 5hmC but not 5mC. Glucosyltransferase enzymes are known to those of skill in the art, and include, for example, β-glucosyltransferase (βGT). By way of example, the enzyme T4 β-glucosyltransferase is commercially available (βGT, NEB) and can be used for modification of 5hmC. Methods for using a βGT to glucosylate 5hmC are known in the art, and can be used in conjunction with the use of altered cytidine deaminase enzymes as presented here. For example, a sample of DNA can be treated with a βGT to glucosylate 5hmC in the sample DNA prior to treating the DNA with the altered cytidine deaminase enzyme. By treating the sample DNA with a βGT, 5hmC is protected from the deaminase activity of the altered cytidine deaminase enzyme. Thus, 5mC will be detected in downstream readout, such as sequencing, PCR, array, and the like, as a thymidine. In contrast, any protected 5hmC sites will be detected as cytosine in the same readout (FIG. 4). Enzymes, buffers, and conditions for performing glucosylation of 5hmC are known in the art, as exemplified by the methods disclosed in Schutsky et al., Nature biotechnology, 10.1038/nbt.4204. 8 Oct. 2018, doi:10.1038/nbt.4204.

[0238] In some embodiments, an ACD or dACD as presented herein can be used in in vitro diagnostic (IVD) approaches for profiling methylation in a locus-specific manner. Current methods for methylation biomarker detection typically include digestion of genomic DNA with methylation-sensitive enzymes and then quantitative PCR (qPCR) at a locus of interest to quantify the extent of restriction enzyme digestion, and therefore the percent methylation at that site. This is followed by mismatch-sensitive qPCR of bisulfite-treated DNA, where 5mC is read out as a lack of 5mC>T conversion. These methods, however, have drawbacks. The recognition site of the methyl-sensitive restriction enzyme must be present in the methylated region of the target locus. Bisulfite treatment requires a large quantity of starting DNA and results in conversion to a low complexity genome (unmethylated cytosines—which represent the majority of cytosines in the genome—are converted to U and read as T). This reduced complexity of the genomic template constrains the design of qPCR primers that hybridize specifically to the locus of interest. During bisulfite conversion, DNA is intrinsically damaged or lost, which can hinder downstream analysis. DNA damage decreases coverage uniformity of the genome, which can lead to bias coverage. Furthermore, incomplete bisulfite conversion has the potential to adversely affect results, since it can exaggerate DNA methylation levels (Sam et al., PLoS One. 2018; 13(6); Ehrich et al., Nucleic Acids Res. Oxford University Press; 2007; 35: e29).

[0239] Methylation-sensitive enzymes also fail to identify and digest sites that contain 5hmC, and 5hmC to T conversion by an ACD described herein obviates the need for restriction enzymes or bisulfite treatment, and preserves DNA complexity. The resulting modifications of one or more cytosines can be detected using established in vitro diagnostic (IVD) approaches for profiling methylation in a locus-specific manner. Examples of approaches include detection of 5mC loci via amplification, e.g., quantitative PCT (qPCR), detection of 5mC loci using a CRISPR-based system, e.g., CRISPR-Cas12, spatial detection of 5mC using molecular cytogenic methods, e.g., fluorescence in situ hybridization (FISH), and array-based detection of 5mC (International Application No. PCT/US2023/017846). These methods of detecting 5mC can be easily used for detecting 5hmC; an ACD having 5hmC-preferring activity is used instead of an ACD having 5mC-preferring activity. In one embodiment, in vitro diagnostic (IVD) approaches for profiling methylation in a locus-specific manner use one or more primers to anneal to a predetermined sequence that may include one or more modified cytosines. After treatment of target nucleic acids with an ACD, the modified cytosines present in the target nucleic acids are converted as described herein (e.g., 5hmC is converted to T), and primers can be easily designed to anneal with higher affinity to a predetermined sequence when it includes nucleotides resulting from the deaminase treatment (e.g., a T nucleotide where a 5hmC was present prior to treatment). For example, primers used for an amplification bind with greater affinity to a nucleic acid that includes T nucleotides where 5hmC nucleotides were present prior to treatment (International Application No. PCT/US2023/017846, incorporated by reference regarding primers). The annealing of a primer to a predetermined sequence that includes the expected 5hmC to T conversion(s) allows one to infer the location of a modified cytosine in the untreated target nucleic acid. A primer that binds with greater affinity to a nucleic acid that includes T nucleotides where 5hmC nucleotides were present prior to treatment can include at least 1, at least 2, at least 3, at least 4 or at least 5 nucleotides that will base-pair with a nucleotide that results from conversion of 5hmC to T, i.e., an adenine (A), and when amplification is used, then a second primer for the reverse strand that has a T instead of guanine (G).

[0240] In some embodiments, target nucleic acids obtained from a subject can be treated with an ACD to result in converted nucleic acids, and a pattern of cytosine modification can be identified in the converted nucleic acids. The pattern of cytosine modification can optionally be compared with the pattern of cytosine modification in a reference nucleic acid. In embodiments where a pattern of cytosine modification correlates with a disease or condition, the method can be used in diagnostic or prognostic applications. For instance, the subject can have or be at risk of having a disease or condition, and the reference nucleic acid can be from a normal subject, e.g., a subject that does not have and is not at risk for the disease or condition. The pattern of cytosine modification can be associated with a disease or condition (e.g., the target nucleic acid can be a predetermined sequence), and identification in the subject of a pattern of cytosine modification associated with a disease or condition can indicate the subject has or is at risk of having the disease or condition. For instance, a pattern of cytosine modification can be linked in-cis to a coding region that is correlated with a disease or condition and identification of that pattern, or absence of that pattern, in the subject can be used for diagnosis or prognosis. In one embodiment, the coding region can be one that is transcriptionally active or transcriptionally inactive in a reference nucleic acid. The comparison of the converted nucleic acid to the reference nucleic acid can include determining if the pattern of cytosine modification of the converted nucleic acid indicates the coding region is transcriptionally active or transcriptionally inactive in the subject. When that coding region is associated with a disease or condition, the status of transcriptional activity can be used for diagnosis or prognosis.

[0241] Comparison of a pattern of cytosine modification in a subject can also be used in identifying changes in a pattern of cytosine modification in a subject over time. For instance, a subject can have a disease or conditions and is undergoing treatment, or a subject had a disease or condition and is cured (e.g., the subject was treated and no signs of the disease or condition are present) or in remission (e.g., the subject was treated and signs of the disease or condition are reduced). Target nucleic acids from the subject at different times, e.g., before treatment started, during treatment, after treatment is stopped, can be compared and a pattern of cytosine modification of a sequence, e.g., a predetermined sequence compared and used to determine the progress of a treatment or the status of the disease or condition in the subject.

[0242] In some embodiments where detection of 5hmC nucleotides uses amplification, the use of a polymerase that disfavors uracil can aid in reducing the amplification of treated target nucleic acids that include spurious C to U conversion that may result from use of an ACD. B-family polymerases are known to exhibit “uracil read-ahead” function which causes stalling of the polymerase at uracil residues (Greagg et al., 1999, PNAS USA; 96(16):9045-50). Examples of B-family polymerases that disfavor uracil include archaeal B-family polymerases from Pyrococcus furiosus (Pfu), Thermococcus kodakarensis (KOD), Thermococcus litoralis (Tli/Vent), Pyrococcus woesei (Pwo), and Thermococcus fumicolans (Tfu). Other examples of uracil-disfavoring polymerases include Phusion™, Q5®, and Kapa HiFi™. In other embodiments where amplification of nucleic acids containing uracil nucleotides is desired, the use of a uracil tolerant polymerase can be used. Examples of uracil-tolerant polymerases include PhusionU™, Q5U®, KapaU™, Taq, and Dpo4.

[0243] Wild-type cytidine deaminases typically function at near-neutral pH, e.g., pH 7. ACDs described herein can have increased activity at below neutral pH. In some embodiments, the pH of a reaction that includes an ACD described herein can be no greater than pH 8, no greater than 7.8, no greater than 7.7, no greater than 7.6, no greater than 7.5, no greater than 7.4, no greater than 7.3, no greater than 7.2, no greater than 7.1, no greater than 7.0, no greater than pH 6.7, no greater than pH 6.5, no greater than pH 6.3, no greater than pH 6.1, no greater than pH 6.0. In some embodiments, the pH of a reaction that includes an ACD described herein can be at least pH 5.1, at least pH 5.3, at least pH 5.5, at least pH 5.7, at least pH 5.9, at least pH 6.1, at least pH 6.3, at least pH 6.5, at least pH 6.7, at least pH 6.9, at least pH 7.0, at least pH 7.1, at least pH 7.2, at least pH 7.3, at least pH 7.4, at least pH 7.5. In some embodiments, the pH of a reaction that includes an ACD described herein can be no greater than pH 7.5, no greater than pH 7.3, or no greater than pH 7.1. Examples of ranges of pH in a reaction include at least 6 to no greater than 8, at least 6.5 to no greater than 8, at least 7 to no greater than 8, or at least 6.9 to no greater than 7.6, e.g., pH of about 7.0 to about 7.5.

[0244] It is expected that an ACD can function in essentially any buffer. Examples of useful buffers include, but are not limited to: a citrate buffer, such as the citrate buffer available from Thermo Fisher Scientific (Cat. No. #005000); sodium acetate buffer, Bis Tris-Propane HCl; and Tris-HCl Tris. Examples of other buffers include, but are not limited to, Bicine, DIPSO, glycylglycine, HEPES, imidazole, malonate, MES, MOPS, PB, phosphate, PIPES, SPG, succinate, TAPS, TAPSO, trincine. In some embodiments a reducing agent such as dithiothreitol (DTT), TCEP, can be present. In some embodiments a divalent cation may be included, for example, Zinc. In some embodiments, a divalent cation is not included.

[0245] A deamination reaction can occur at a temperature of 25° C. to 75° C., such as 37 or 50° C. Suitable temperature ranges include from about 37° C. to 75° C., alternatively about 42° C. to 75° C., alternatively about 48° C.-75° C., about 50° C. to 75° C., alternatively about 50° C. to 65° C., and any temperature or range between. Some ACDs described herein preferentially deaminate a modified cytosine to thymidine at a faster rate than deamination of cytosine to uracil. Thus, in some embodiments the time of reaction can be used to maximize the difference of deamination of modified cytosine versus deamination of cytosine. In one embodiment, the reaction can proceed for at least 15 minutes, at least 30 minutes, at least 45 minutes, at least 60 minutes, at least 90 minutes, at least 120 minutes, or at least 150 minutes, and for no greater than 15 minutes, no greater than 30 minutes, no greater than 45 minutes, no greater than 60 minutes, no greater than 90 minutes, no greater than 120 minutes, no greater than 150 minutes, or no greater than 180 minutes.

[0246] In one embodiment, a deamination reaction can include an ACD at a concentration from at least 0.05 micromolar (μM) to no greater than 5 μM. For instance, the concentration of the enzyme can be at least 0.05, at least 0.1 μM, at least 0.2 μM, at least 0.3 μM, at least 0.4 PM, or at least 0.5 μM, at least 0.6 μM, at least 0.7 μM, at least 0.8 μM, at least 0.9 μM, at least 1.0 M and/or no greater than 5 μM, no greater than 4 μM, no greater than 3 μM, no greater than 2 μM, no greater than 1 μM, or 0.5 μM. In one embodiment, a deamination reaction can include nucleic acids at a concentration of at least 1 picomolar (μM) to no greater than 2 PM. For instance, the concentration of nucleic acids can be at least 1 μM, at least 3 μM, at least 6 μM, at least 10 μM, at least 100 μM, at least 1 nanomolar (nM), at least 40 nM, at least 400 nM, at least 500 nM, at least, 600 nM, at least 700 nM, at least 800 nM, at least 900 nM, or 1 PM, and/or no greater than 1 μM, no greater than 900 nM, no greater than 800 nM, no greater than 700 nM, no greater than 600 nM, no greater than 500 nM, no greater than 400 nM, no greater than 40 nM, no greater than 1 nM, no greater than 100 nM, no greater than 6 nM, or no greater than 3 nM.

[0247] The substrate of an ACD described herein can be a single stranded nucleic acid, such as single stranded DNA (ssDNA). ssDNA is susceptible to the formation of secondary structure such as hairpins, which can reduce accessibility of reaction sites to an ACD and increase the production of false positives. Accordingly, some embodiments a method of using an ACD can include the use of one or more denaturant to reduce the formation of secondary structure. Examples of denaturants include DMSO and betaine.

[0248] Stability-enhancing substitution mutations increase the thermal melting point of an ACD, and increased temperature optimums are highly desirable because it decreases DNA secondary structures by opening reaction sites that would be otherwise inaccessible due to secondary structure resulting in decreased false positive rate; stabilizes the enzyme in reaction conditions, which permits longer incubations and increased conversion; increases reaction kinetics, which allows for more tightly controlled conditions; and improved characteristics for commercialization, including increased shelf life, robustness in the assay, manufacturability, etc.

[0249] In one embodiment, a deamination reaction can include an RNAse. RNase A has been implicated in increasing activity of cytidine deaminases (Bransteitter et al., Proceedings of the National Academy of Sciences of the United States of America 100, no. 7 (2003): 4102-7. doi.org/10.1073/pnas.0730835100). When activity of an ACD of the present disclosure was determined in the presence of RNAse A the opposite was observed. When RNAse A was included in the reaction, an ACD having cytosine-defective deaminase activity (i.e., converts 5mC to T at a greater rate than converting C to U) had reduced activity, and the reduced activity was more pronounced for off-target cytosine deamination. Thus, RNAse A resulted in greater selectivity for deamination of 5mC compared to C, and it is expected that RNAse A will result in greater selectivity for deamination of 5hmC compared to C. An RNAse A can be included in a deamination reaction at a concentration from at least 1 microgram/milliliter (ug/ml) to no greater than 20 μM. For instance, the concentration of RNAse A can be at least 1 μg/ml, at least 2 μg/ml, at least 3 μg/ml, at least 4 μg/ml, 5 μg/ml, 6 μg/ml, 7 μg/ml, 8 μg/ml, or 9 μg/ml, and/or no greater than 50 μg/ml, no greater than 40 μg/ml, no greater than 30 μg/ml, no greater than 20 μg/ml, no greater than 19 μg/ml, no greater than 18 μg/ml, no greater than 17 μg/ml, no greater than 16 μg/ml, no greater than 15 μg/ml, no greater than 14 μg/ml, no greater than 13 μg/ml, no greater than 12 μg/ml, or no greater than 11 μg/ml. In one embodiment, the concentration of RNAse A is from 2 μg/ml to 13 μg/ml, or from 5 μg/ml to 10 μg/ml.

### Target Nucleic Acids

[0250] The target nucleic acids contacted with an ACD and used in the methods, compositions, and kits provided herein may be essentially any nucleic acid of known or unknown sequence. Sequencing may result in determination of the sequence of the whole or a part of the target molecule. In one embodiment, target nucleic acids can be processed into templates suitable for amplification by the placement of universal amplification sequences, e.g., sequences present in a universal adaptor, at the ends of each target fragment.

[0251] Target nucleic acids are typically derived from primary nucleic acids present in a sample, such as a biological sample. The primary nucleic acids may originate as DNA or RNA. DNA primary nucleic acids may originate in double-stranded DNA (dsDNA) form (e.g., genomic DNA, genomic DNA fragments, cell-free DNA, and the like) from a sample or may originate in single-stranded form from a sample. RNA primary nucleic acids may be mRNA or non-coding RNA, e.g., microRNA or small interfering RNA. The precise sequence of the polynucleotide molecules from a primary nucleic acid sample is generally not material to the disclosure and may be known or unknown.

[0252] The primary nucleic acid molecules may represent the entire genetic complement of an organism, e.g., genomic DNA molecules which include both intron and exon sequences, as well as non-coding regulatory sequences such as promoter and enhancer sequences. The primary nucleic acid molecules may represent the entire genetic complement of specific cells of an organism, e.g., from tumor cells, where the genomic DNA molecules which include both intron and exon sequences, as well as non-coding regulatory sequences such as promoter and enhancer sequences. In one embodiment, particular subsets of genomic DNA can be used, such as, for example, particular chmosomes, DNA associated with open chromatin, DNA associated with closed chromatin, or one or more specific sequences such as a region of a specific gene (e.g., targeted sequencing). In one embodiment, the primary nucleic acid molecules may represent a particular subset of DNA, e.g., DNA having a specific sequence that anneals with a primer such as one used for targeted sequencing or target enrichment. In one embodiment, a particular subset of DNA can be used, such as cell-free DNA, which can include DNA of the subject including DNA from normal cells, DNA from diseased cells such as tumor cells, and/or DNA from fetal cells.

[0253] The primary nucleic acid molecules may represent the entire transcriptome of cells of an organism, e.g., mRNA molecules. The primary nucleic acid molecules may represent the entire transcriptome of specific cells of an organism, e.g., from tumor cells or for instance the cells of a tissue. In one embodiment, the primary nucleic acid molecules may represent a particular subset of mRNA, e.g., mRNA having a specific sequence that anneals with a primer such as one used for targeted sequencing or target enrichment.

[0254] A sample, such as a biological sample, can include nucleic acid molecules obtained from biopsies, tumors, scrapings, swabs, blood, mucus, urine, stool, plasma, semen, hair, laser capture micro-dissections, surgical resections, and other clinical or laboratory obtained samples. In some embodiments, the sample can be an epidemiological, agricultural, forensic or pathogenic sample. In some embodiments, the sample can include cultured cells. In some embodiments, the sample can include nucleic acid molecules obtained from an animal such as a human or mammalian source. In another embodiment, the sample can include nucleic acid molecules obtained from a non-mammalian source such as a plant, bacteria, virus, or fungus. In some embodiments, the source of the nucleic acid molecules may be an archived or extinct sample or species.

[0255] Additional non-limiting examples of sources of biological samples can include whole organisms as well as a sample obtained from a patient. The biological sample can be obtained from any biological fluid or tissue and can be in a variety of forms, including fluid, e.g., liquid or gas, tissue, solid tissue, and preserved forms of such a fluid or tissue, such as dried, frozen, and fixed forms. The sample may be of any biological tissue, cells or fluid. Such samples include, but are not limited to, sputum, blood, serum, plasma, blood cells (e.g., white cells), ascitic fluid, urine, saliva, tears, sputum, vaginal fluid (discharge), washings obtained during a medical procedure (e.g., pelvic or other washings obtained during biopsy, endoscopy or surgery), tissue, nipple aspirate, core or fine needle biopsy samples, cell-containing body fluids, peritoneal fluid, and pleural fluid, or cells therefrom, and free floating nucleic acids such as cell-free circulating DNA. Biological samples may also include sections of tissues such as frozen or fixed sections taken for histological purposes or micro-dissected cells or extracellular parts thereof. In some embodiments, the sample can be a blood sample, such as, for example, a whole blood sample. In another example, the sample is an unprocessed dried blood spot (DBS) sample. In yet another example, the sample is a formalin-fixed paraffin-embedded (FFPE) sample. In yet another example, the sample is a saliva sample. In yet another example, the sample is a dried saliva spot (DSS) sample.

[0256] Exemplary biological samples from which target nucleic acids can be derived include, for example, those from a eukaryote, for instance a mammal, such as a rodent, mouse, rat, rabbit, guinea pig, ungulate, horse, sheep, pig, goat, cow, cat, dog, primate, human or non-human primate; a plant, such as Arabidopsis thaliana, corn, sorghum, oat, wheat, rice, canola, or soybean; an algae, such as Chlamydomonas reinhardtii; a nematode such as Caenorhabditis elegans; an insect, such as Drosophila melanogaster, mosquito, fruit fly, honey bee or spider; a fish, such as zebrafish; a reptile; an amphibian, such as a frog or Xenopus laevis; a Dictyostelium discoideum; a fungi, such as Pneumocystis carinii, Takifugu rubripes, yeast, Saccharamoyces cerevisiae, or Schizosaccharomyces pombe; or a protozoan such as Plasmodium falciparum, Target nucleic acids can also be derived from a prokaryote such as a bacterium, Escherichia coli, Staphylococcus or Mycoplasma pneumoniae; an archaeon; a virus such as Hepatitis C virus or human immunodeficiency virus; or a viroid. Target nucleic acids can be derived from a homogeneous culture or population of organisms described herein or alternatively from a collection of several different organisms, for example, in a community or ecosystem.

[0257] In some embodiments, a biological sample includes tissue that is processed to obtain the desired primary nucleic acids. In some embodiments, cells are used obtain the desired primary nucleic acids. In some embodiments, nuclei are used to obtain the desired primary nucleic acids. The method can further include dissociating cells, and/or isolating nuclei from cells. Methods for isolating cells and nuclei from tissue are available (WO 2019/236599).

[0258] In some embodiments, nucleic acids present in tissue, in cells, or in isolated nuclei can be processed depending on the desired read-out. For instance, nucleic acids can be fixed during processing, and useful fixation methods are available (WO 2019/236599). Fixation can be useful to preserve a sample or maintain contiguity of analytes from a sample, a cell, or a nucleus. Fixation methods preserve and stabilize tissue, cell, and nucleus morphology and architecture, inactivates proteolytic enzymes, strengthens samples, cells, and nuclei so they can withstand further processing and staining, and protects against contamination. Examples of methods where fixation can be useful include, but are not limited to, whole genome sequencing of isolated nuclei and chromosome conformation capture methods such as Hi-C. Common methods of fixation include perfusion, immersion, freezing, and drying (Srinivasan et al., Am J Pathol. 2002 December; 161(6): 1961-1971.doi: 10.1016/S0002-9440(10)64472-0). In some embodiments such as whole genome sequencing, isolated nuclei can be processed to dissociate nucleosomes from DNA while leaving the nuclei intact, and methods for generating nucleosome-free nuclei are available (WO 2018/018008).

[0259] In some embodiments, primary nucleic acids in bulk, e.g., from a plurality of cells, can be used to produce a sequencing library as described herein. In other embodiments, individual cells or nuclei can be used as sources of primary nucleic acids to obtain sequence information from single cells and nuclei. Many different single cell library preparation methods are known in the art, including, but not limited to, Drop-seq, Seq-well, and single cell combinatorial indexing (“sci-”) methods. Companies providing single cell products and related technologies include, but are not limited to, Illumina, 10× Genomics, Takara Biosciences, BD Biosciences, Bio-Rad Laboratories, 1cellbio, Isoplexis, CellSee, NanoSelect, and Dolomite Bio. Sci-seq is a methodological framework that employs split-pool barcoding to uniquely label the nucleic acid contents of large numbers of single cells or nuclei. Typically, the number of nuclei or cells can be at least two. The upper limit is dependent on the practical limitations of equipment (e.g., multi-well plates, number of indexes) used in other steps of the methods as described herein. The number of nuclei or cells that can be used is not intended to be limiting and can number in the billions.

[0260] The target nucleic acids used in the methods and compositions of the present disclosure can be derived by fragmentation. Random fragmentation refers to the fragmentation of a polynucleotide molecule from a primary nucleic acid sample in a non-ordered fashion by enzymatic, chemical, or mechanical methods. Such fragmentation methods are known in the art and use standard methods (Sambrook and Russell, Molecular Cloning, A Laboratory Manual, third edition). Moreover, random fragmentation is designed to produce fragments irrespective of the sequence identity or position of nucleotides comprising and/or surrounding the break. In one embodiment, the random fragmentation is by mechanical means such as nebulization or sonication to produce fragments of about 50 base pairs in length to about 1500 base pairs in length, still more particularly 50-700 base pairs in length, yet more particularly 50-400 base pairs in length. Most particularly, the method is used to generate smaller fragments of from 50-150 base pairs in length.

[0261] Fragmentation of polynucleotide molecules by mechanical means (nebulization, sonication, and Hydroshear, for example) results in fragments with a heterogeneous mix of blunt and 3′- and 5′-overhanging ends. It is therefore desirable to repair the fragment ends using methods or kits (such as the Lucigen DNA terminator End Repair Kit) known in the art to generate ends that are optimal for insertion, for example, into blunt sites of cloning vectors. In a particular embodiment, the fragment ends of the population of nucleic acids are blunt ended. More particularly, the fragment ends are blunt ended and phosphorylated. The phosphate moiety can be introduced via enzymatic treatment, for example, using polynucleotide kinase.

[0262] In a particular embodiment, the target fragment sequences are prepared with single overhanging nucleotides by, for example, activity of certain types of DNA polymerase such as Taq polymerase or Klenow exo minus polymerase which has a non-template-dependent terminal transferase activity that adds a single deoxynucleotide, for example, deoxyadenosine (A) to the 3′ ends of a DNA molecule, for example, a PCR product. Such enzymes can be used to add a single nucleotide ‘A’ to the blunt ended 3′ terminus of each strand of the double-stranded target fragments. Thus, an ‘A’ could be added to the 3′ terminus of each end repaired strand of the double-stranded target fragments by reaction with Taq or Klenow exo minus polymerase, while the universal adapter polynucleotide construct could be a T-construct with a compatible ‘T’ overhang present on the 3′ terminus of each region of double-stranded nucleic acid of the universal adapter. This end modification also prevents self-ligation of both vector and target such that there is a bias towards formation of target nucleic acids having a universal adapter at each end.

[0263] In one embodiment, fragmentation can be accomplished using a process often referred to as tagmentation. Tagmentation uses a transposome complex and combines into a single step fragmentation and ligation to add universal adapters (WO 2016/130704). A transposome complex is a transposase bound to a transposase recognition site and can insert the transposase recognition site into a target nucleic acid in a process sometimes termed “tagmentation.” In some such insertion events, one strand of the transposase recognition site may be transferred into the target nucleic acid. Such a strand is referred to as a “transferred strand.” In one embodiment, a transposome complex includes a dimeric transposase having two subunits, and two non-contiguous transposon sequences. In another embodiment, a transposase includes a dimeric transposase having two subunits, and a contiguous transposon sequence.

[0264] Some embodiments can include the use of a hyperactive Tn5 transposase and a Tn5-type transposase recognition site (Goryshin and Reznikoff, J. Biol. Chem., 273:7367 (1998)), or MuA transposase and a Mu transposase recognition site comprising R1 and R2 end sequences (Mizuuchi, K., Cell, 35: 785, 1983; Savilahti, H, et al., EMBO J., 14: 4893, 1995). Tn5 Mosaic End (ME) sequences can also be used by a skilled artisan.

[0265] Examples of transposon sequences useful with the methods and compositions described herein are provided in U.S. Patent Application Pub. No. 2012/0208705, U.S. Patent Application Pub. No. 2012/0208724 and Int. Patent Application Pub. No. WO 2012/061832. In some embodiments, a transposon sequence includes a first transposase recognition site and a second transposase recognition site.

[0266] Some transposome complexes useful herein include a transposase having two transposon sequences. In some such embodiments, the two transposon sequences are not linked to one another, in other words, the transposon sequences are non-contiguous with one another.

[0267] Examples of such transposomes are known in the art (see, for instance, U.S. Patent Application Pub. No. 2010/0120098).

[0268] In one embodiment, tagmentation is used to produce target nucleic acids that include different universal sequences at each end. This can be accomplished by using two types of transposome complexes, where each transposome complex includes a different nucleotide sequence that is part of the transferred strand.

[0269] A population of target nucleic acids can have an average strand length that is desired or appropriate for a particular application of the methods, compositions, or kits set forth herein. For example, the average strand length can be less than about 100,000 nucleotides, 50,000 nucleotides, 10,000 nucleotides, 5,000 nucleotides, 1,000 nucleotides, 500 nucleotides, 100 nucleotides, or 50 nucleotides. Alternatively or additionally, the average strand length can be greater than about 10 nucleotides, 50 nucleotides, 100 nucleotides, 500 nucleotides, 1,000 nucleotides, 5,000 nucleotides, 10,000 nucleotides, 50,000 nucleotides, or 100,000 nucleotides. The average strand length for a population of target nucleic acids can be in a range between a maximum and minimum value set forth herein. It will be understood that amplicons generated at an amplification site (or otherwise made or used herein) can have an average strand length that is in a range between an upper and lower limit selected from those exemplified above.

[0270] In some cases, a population of target nucleic acids can be produced under conditions or otherwise configured to have a maximum length for its members. For example, the maximum length for the members that are used in one or more steps of a method set forth herein or that are present in a particular composition can be less than 100,000 nucleotides, less than 50,000 nucleotides, less than 10,000 nucleotides, less than 5,000 nucleotides, less than 1,000 nucleotides, less than 500 nucleotides, less than 100 nucleotides, or less than 50 nucleotides.

[0271] Alternatively or additionally, a population of target nucleic acids can be produced under conditions or otherwise configured to have a minimum length for its members. For example, the minimum length for the members that are used in one or more steps of a method set forth herein or that are present in a particular composition can be more than 10 nucleotides, more than 50 nucleotides, more than 100 nucleotides, more than 500 nucleotides, more than 1,000 nucleotides, more than 5,000 nucleotides, more than 10,000 nucleotides, more than 50,000 nucleotides, or more than 100,000 nucleotides. The maximum and minimum strand length for target nucleic acids in a population can be in a range between a maximum and minimum value set forth above. It will be understood that amplicons generated at an amplification site (or otherwise made or used herein) can have maximum and/or minimum strand lengths in a range between the upper and lower limits exemplified above.

[0272] In some embodiments, a sample can be enriched for sequences of interest, e.g., a predetermined sequence. For example, a subset of genes or regions of the genome are isolated and sequenced, or a subset of genes or regions of the genome are interrogated by other methods, such as a locus-specific in vitro diagnostic method. A predetermined sequence can be, for instance, one that can have a pattern of cytosine modification.

[0273] In some embodiments, target enrichment works by capturing genomic regions of interest by hybridization to target-specific probes that can be used to physically separate target DNA that has hybridized to bait probes from all other DNA in solution, which are then washed away. For example, some methods of enrichment use biotinylated probes, which are then isolated by magnetic pulldown with streptavidin-coated magnetic particles. In another example, some methods of enrichment use analyte arrays, also known as microarrays, that allow for the hybridization of predetermined sequences.

[0274] Enrichment can occur, for example, prior to treatment with ACD. In such embodiments, enriching a nucleic acid of interest, or a fragment thereof, such as enriching DNA in a sample, may include any suitable enrichment techniques. In some embodiments, enrichment of DNA may include enrichment through molecular inversion probes, in solution capture, pulldown probes, bait sets, standard PCR, multiplex PCR, hybrid capture, endonuclease digestion, DNase I hypersensitivity, and selective circularization. Enrichment can be achieved through negative selection of nucleic acids by eliminating undesired material. This sort of enrichment includes ‘footprinting’ techniques or ‘subtractive’ hybrid capture. During the former, the target sample is safe from nuclease activity through the protection of protein or by single and double stranded arrangements. During the latter, nucleic acids that bind ‘bait’ probes are eliminated.

[0275] In some embodiments, enriching can comprise amplification using target-specific primers. In some embodiments, amplification is performed subsequent to another form of enrichment. Typically, however, in embodiments where amplification is used for enrichment, the amplification step occurs after treatment with deaminase, to preserve methylation status of the target DNA. In some such embodiments, amplification can include PCR amplification or genome-wide amplification.

[0276] In some embodiments, enrichment can occur after treatment with an ACD. Typically, methods used to identity methylated cytosines result in the loss of DNA complexity due to conversion of unmethylated DNA bases to uracil, resulting in 3-base genome and limits the use of sequences that specifically hybridize to a predetermined sequence. Accordingly, typical methods for identifying methylated cytosines are more difficult to use in methods that include enrichment, such as hybrid-enrichment sequencing and amplicon-based targeted sequencing, after conversion of methylated cytosines. In contrast, because of (i) the 5mC to T conversion by ACDs and (ii) only a small percentage of cytosines are methylated and expected to be converted by an ACD. Examples of enrichment-based methods that can be used after treatment of a target nucleic acid with an ACD include but are not limited to analyte arrays, use of primers for selective amplification, CRISPR-Cas systems, and molecular cytogenic techniques such as FISH.

[0277] Examples of arrays include, for instance, methylation arrays for interrogation of selected methylation sites across a genome (e.g., the Infinium MethylationEPIC BeadChip, Illumina).

### Attachment of Universal Adapters

[0278] In some embodiments, a target nucleic acid used in a method, composition, or kit described herein can include a universal adapter attached to each end. A target nucleic acid having a universal adapter at each end can be referred to as a “modified target nucleic acid.” Methods for attaching a universal adapter to each end of a target nucleic acid used in a method described herein are known to the person skilled in the art. The attachment can be through tagmentation using transposase complexes (WO 2016/130704), or through standard library preparation techniques using ligation (U.S. Pat. Pub. No. 2018/0305753). Attachment of a universal adapter to the ends of a target nucleic acid can occur before or after treatment of the target nucleic acid with an ACD.

[0279] In one embodiment, double-stranded target nucleic acids from a sample, e.g., a fragmented sample that has been contacted with an ACD and converted from single-stranded to double-stranded nucleic acids, are treated by first ligating identical universal adaptor molecules to the 5′ and 3′ ends of the double-stranded target nucleic acids. In one embodiment, the universal adapters are “matched” adapters or Y-adapters because the two strands of the adaptors are formed by annealing complementary polynucleotide strands. In one embodiment, the universal adapters used in the method of the disclosure are referred to as “mismatched” adaptors because the adaptors include a region of sequence mismatch, i.e., they are not formed by annealing fully complementary polynucleotide strands. The general features of mismatched adaptors are further described in Gormley et al., U.S. Pat. No. 7,741,463, and Bignell et al., U.S. Pat. No. 8,053,192,). The universal adaptor typically includes universal capture binding sequences that aid in immobilizing the target nucleic acids on an array for subsequent sequencing, and universal primer binding sites useful for the sequencing. In another embodiment, double-stranded target nucleic acids from a sample, a sample that has been contacted with an ACD and converted from single-stranded to double-stranded nucleic acids, are subjected to tagmentation with a transposome complex that inserts a universal adapter, or sequences that can be used to add a universal adapter, into a target nucleic acid.

[0280] A universal adapter can optionally include at least one index. An index can be used as a marker characteristic of the source of particular target nucleic acids on a flow cell (U.S. Pat. No. 8,053,192). Generally, the index is a synthetic sequence of nucleotides that is part of the universal adapter which is added to the target nucleic acids as part of the library preparation step.

[0281] Accordingly, an index is a nucleic acid sequence which is attached to each of the target molecules of a particular sample, the presence of which is indicative of, or is used to identify, the sample or source from which the target molecules were isolated.

[0282] Preferably an index may be up to 20 nucleotides in length, more preferably 1-10 nucleotides, and most preferably 4-6 nucleotides in length. A four nucleotide index gives a possibility of multiplexing 256 samples on the same array, a six base index enables 4096 samples to be processed on the same array.

[0283] The precise nucleotide sequence of the universal adapters is generally not material to the disclosure and may be selected by the user such that the desired sequence elements are ultimately included in the common sequences of the plurality of different modified target nucleic acids, for example, to provide for the universal capture binding sequences for immobilizing the target nucleic acids on an array for subsequent sequencing, and binding sites for particular sets of universal amplification primers and/or sequencing primers. Additional sequence elements may be included, for example, to provide binding sites for sequencing primers which will ultimately be used in sequencing of target nucleic acids in the library, sequencing of an index, or products derived from amplification of the target nucleic acids in the library, for example on a solid support.

[0284] In order to prepare a library of deaminase-treated DNA for analysis using a sequencing platform, it may be useful to make additional modifications to the target DNA, either prior to or after treatment with ACD. In some embodiments, single-stranded deaminase-treated DNA is prepared for sequencing using a single-stranded library preparation method, as is known in the art. Such methods include, but are not limited to, template switching based second strand synthesis, adapters containing a single-stranded splint overhang, and the like. Reagents for performing single-stranded library preparation methods are commercially available. Examples include xGen ssDNA & Low-Input DNA Library Prep Kit (Integrated DNA Technologies catalog number 10009859), previously sold as Accel-NGS (Swift Biosciences), NGS Single Stranded DNA Library Prep Kit (BioDynami catalog number 30082). Another example includes single-reaction single-stranded library (SRSLY) as set forth in Troll et al., BMC Genomics 20, 1023 (2019).

[0285] In some embodiments, library preparation modifications are made to double-stranded target DNA prior to treatment with an ACD. Methods for library preparation of double-stranded DNA template are known in the art, and include Y-adaptor ligation, transposome-based tagmentation, and the like. It will be appreciated by those of skill in the art that methods of double-strand library preparation often include one or more amplification steps using for example, PCR. In such methods, the amplification step may be deferred until after ACD treatment, to preserve the methylation status of the template strand. For example, in Y-adapter ligation methods, the Y-adapters can be ligated to the double-stranded template, after which the adapter-ligated template DNA is denatured and treated with an ACD as described elsewhere herein. Following treatment with an ACD, the resulting treated single-strand DNA molecules can be amplified using PCR, bridge amplification, and other methods as are commonly known in the art.

### Preparation of Immobilized Samples for Sequencing

[0286] The library of modified target nucleic acids, e.g., target nucleic acids having universal adapters at each end, can be prepared for sequencing. Methods for attaching modified target nucleic acids to a substrate are known in the art. In one embodiment, modified fragments are enriched using a plurality of capture oligonucleotides having specificity for the modified fragments, and the capture oligonucleotides can be immobilized on a surface of a solid substrate such as a flow cell or a bead. For instance, capture oligonucleotides can include a first member of a universal binding pair, and where a second member of the binding pair is immobilized on a surface of a solid substrate. Likewise, methods for amplifying immobilized target nucleic acids include, but are not limited to, bridge amplification and exclusion amplification (also referred to as kinetic exclusion amplification (KEA). Methods for immobilizing and amplifying prior to sequencing are described in, for instance, Bignell et al. (U.S. Pat. No. 8,053,192), Gunderson et al. (WO2016/130704), Shen et al. (U.S. Pat. No. 8,895,249), and Pipenburg et al. (U.S. Pat. No. 9,309,502).

[0287] A pooled sample can be immobilized in preparation for sequencing. Sequencing can be performed as an array of single molecules or can be amplified prior to sequencing. The amplification can be carried out using one or more immobilized primers. The immobilized primer(s) can be, for instance, a lawn on a planar surface, or on a pool of beads. The pool of beads can be isolated into an emulsion with a single bead in each “compartment” of the emulsion. At a concentration of only one template per “compartment,” only a single template is amplified on each bead.

[0288] The term “solid-phase amplification” as used herein refers to any nucleic acid amplification reaction carried out on or in association with a solid support such that all or a portion of the amplified products are immobilized on the solid support as they are formed. In particular, the term encompasses solid-phase polymerase chain reaction (solid-phase PCR) and solid phase isothermal amplification which are reactions analogous to standard solution phase amplification, except that one or both of the forward and reverse amplification primers is/are immobilized on the solid support. Solid phase PCR covers systems such as emulsions, where one primer is anchored to a bead and the other is in free solution, and colony formation in solid phase gel matrices wherein one primer is anchored to the surface, and one is in free solution.

[0289] In some embodiments, the solid support comprises a patterned surface. A “patterned surface” refers to an arrangement of different regions in or on an exposed layer of a solid support. For example, one or more of the regions can be features where one or more amplification primers are present. The features can be separated by interstitial regions where amplification primers are not present. In some embodiments, the pattern can be an x-y format of features that are in rows and columns. In some embodiments, the pattern can be a repeating arrangement of features and/or interstitial regions. In some embodiments, the pattern can be a random arrangement of features and/or interstitial regions. Exemplary patterned surfaces that can be used in the methods and compositions set forth herein are described in U.S. Pat. Nos. 8,778,848, 8,778,849 and 9,079,148, and U.S. Pat. Appl. Pub. No. 2014/0243224.

[0290] In some embodiments, the solid support includes an array of wells or depressions in a surface. This may be fabricated as is generally known in the art using a variety of techniques, including, but not limited to, photolithography, stamping techniques, molding techniques and micro-etching techniques. As will be appreciated by those of skill in the art, the technique used will depend on the composition and shape of the array substrate.

[0291] The features in a patterned surface can be wells in an array of wells (e.g., microwells or nanowells) on glass, silicon, plastic or other suitable solid supports with patterned, covalently-linked gel such as poly(N-(5-azidoacetamidylpentyl)acrylamide-co-acrylamide) (PAZAM, see, for example, US Pub. No. 2013/184796, WO 2016/066586, and WO 2015/002813). The process creates gel pads used for sequencing that can be stable over sequencing runs with a large number of cycles. The covalent linking of the polymer to the wells is helpful for maintaining the gel in the structured features throughout the lifetime of the structured substrate during a variety of uses. However, in many embodiments the gel need not be covalently linked to the wells. For example, in some conditions silane free acrylamide (SFA, see, for example, U.S. Pat. No. 8,563,477) which is not covalently attached to any part of the structured substrate, can be used as the gel material.

[0292] In particular embodiments, a structured substrate can be made by patterning a solid support material with wells (e.g., microwells or nanowells), coating the patterned support with a gel material (e.g., PAZAM, SFA, or chemically modified variants thereof, such as the azidolyzed version of SFA (azido-SFA)) and polishing the gel coated support, for example via chemical or mechanical polishing, thereby retaining gel in the wells but removing or inactivating substantially all of the gel from the interstitial regions on the surface of the structured substrate between the wells. Primer nucleic acids can be attached to gel material. A solution of modified target nucleic acids can then be contacted with the polished substrate such that individual modified target nucleic acids will seed individual wells via interactions with primers attached to the gel material; however, the target nucleic acids will not occupy the interstitial regions due to absence or inactivity of the gel material. Amplification of the modified target nucleic acids will be confined to the wells since absence or inactivity of gel in the interstitial regions prevents outward migration of the growing nucleic acid colony. The process can be conveniently manufactured, being scalable and utilizing conventional micro- or nanofabrication methods.

[0293] Although the disclosure encompasses “solid-phase” amplification methods in which only one amplification primer is immobilized (the other primer usually being present in free solution), in one embodiment the solid support is provided with both the forward and the reverse primers immobilized. In practice, there will be a plurality of identical forward primers and/or a plurality of identical reverse primers immobilized on the solid support, since the amplification process requires an excess of primers to sustain amplification. References herein to forward and reverse primers are to be interpreted accordingly as encompassing a plurality of such primers unless the context indicates otherwise.

[0294] As will be appreciated by the skilled reader, any given amplification reaction requires at least one type of forward primer and at least one type of reverse primer specific for the template to be amplified. However, in certain embodiments the forward and reverse primers may include template-specific portions of identical sequence, and may have entirely identical nucleotide sequence and structure (including any non-nucleotide modifications). In other words, it is possible to carry out solid-phase amplification using only one type of primer, and such single-primer methods are encompassed within the scope of the disclosure. Other embodiments may use forward and reverse primers which contain identical template-specific sequences but which differ in some other structural features. For example, one type of primer may contain a non-nucleotide modification which is not present in the other.

[0295] Primers for solid-phase amplification are preferably immobilized by single point covalent attachment to the solid support at or near the 5′ end of the primer, leaving the template-specific portion of the primer free to anneal to its cognate template and the 3′ hydroxyl group free for primer extension. Any suitable covalent attachment means known in the art may be used for this purpose. The chosen attachment chemistry will depend on the nature of the solid support, and any derivatization or functionalization applied to it. The primer itself may include a moiety, which may be a non-nucleotide chemical modification, to facilitate attachment. In a particular embodiment, the primer may include a sulphur-containing nucleophile, such as phosphorothioate or thiophosphate, at the 5′ end. In the case of solid-supported polyacrylamide hydrogels, this nucleophile will bind to a bromoacetamide group present in the hydrogel. A more particular means of attaching primers and templates to a solid support is via 5′ phosphorothioate attachment to a hydrogel comprised of polymerized acrylamide and N-(5-bromoacetamidylpentyl) acrylamide (BRAPA), as described in Int. Pub. No. WO 05/065814.

[0296] Certain embodiments of the disclosure may make use of solid supports that include an inert substrate or matrix (e.g., glass slides, polymer beads, etc.) which has been “functionalized,” for example by application of a layer or coating of an intermediate material including reactive groups which permit covalent attachment to biomolecules, such as polynucleotides. Examples of such supports include, but are not limited to, polyacrylamide hydrogels supported on an inert substrate such as glass. In such embodiments, the biomolecules (e.g., polynucleotides) may be directly covalently attached to the intermediate material (e.g., the hydrogel), but the intermediate material may itself be non-covalently attached to the substrate or matrix (e.g., the glass substrate). The term “covalent attachment to a solid support” is to be interpreted accordingly as encompassing this type of arrangement.

[0297] The pooled samples may be amplified on beads wherein each bead contains a forward and reverse amplification primer. In one embodiment, a library of modified target nucleic acids is used to prepare clustered arrays of nucleic acid colonies, analogous to those described in U.S. Pub. No. 2005/0100900, U.S. Pat. No. 7,115,400, WO 00/18957 and WO 98/44151 by solid-phase amplification and more particularly solid phase isothermal amplification. The terms “cluster” and “colony” are used interchangeably herein to refer to a discrete site on a solid support including a plurality of identical immobilized nucleic acid strands and a plurality of identical immobilized complementary nucleic acid strands. The term “clustered array” refers to an array formed from such clusters or colonies. In this context, the term “array” is not to be understood as requiring an ordered arrangement of clusters.

[0298] The term “solid phase” or “surface” is used to mean either a planar array wherein primers are attached to a flat surface, for example, glass, silica or plastic microscope slides or similar flow cell devices; beads, wherein either one or two primers are attached to the beads and the beads are amplified; or an array of beads on a surface after the beads have been amplified.

[0299] Clustered arrays can be prepared using either a process of thermocycling, as described in WO 98/44151, or a process whereby the temperature is maintained as a constant, and the cycles of extension and denaturing are performed using changes of reagents. Such isothermal amplification methods are described in patent application numbers WO 02/46456 and U.S. Pub. No. 2008/0009420.

[0300] It will be appreciated that any of the amplification methodologies described herein or generally known in the art may be used with universal or target-specific primers to amplify immobilized DNA fragments. Suitable methods for amplification include, but are not limited to, the polymerase chain reaction (PCR), strand displacement amplification (SDA), transcription mediated amplification (TMA) and nucleic acid sequence-based amplification (NASBA), as described in U.S. Pat. No. 8,003,354. The above amplification methods may be employed to amplify one or more nucleic acids of interest. For example, PCR, including multiplex PCR, SDA, TMA, NASBA and the like may be utilized to amplify immobilized DNA fragments. In some embodiments, primers directed specifically to the polynucleotide of interest are included in the amplification reaction.

[0301] Other suitable methods for amplification of polynucleotides may include oligonucleotide extension and ligation, rolling circle amplification (RCA) (Lizardi et al., Nat. Genet. 19:225-232 (1998)) and oligonucleotide ligation assay (OLA) (See generally U.S. Pat. Nos. 7,582,420, 5,185,243, 5,679,524 and 5,573,907; EP 0 320 308 B1; EP 0 336 731 B1; EP 0 439 182 B1; WO 90/01069; WO 89/12696; and WO 89/09835) technologies. It will be appreciated that these amplification methodologies may be designed to amplify immobilized DNA fragments. For example, in some embodiments, the amplification method may include ligation probe amplification or oligonucleotide ligation assay (OLA) reactions that contain primers directed specifically to the nucleic acid of interest. In some embodiments, the amplification method may include a primer extension-ligation reaction that contains primers directed specifically to the nucleic acid of interest. As a non-limiting example of primer extension and ligation primers that may be specifically designed to amplify a nucleic acid of interest, the amplification may include primers used for the GoldenGate assay (Illumina, Inc., San Diego, CA) as exemplified by U.S. Pat. Nos. 7,582,420 and 7,611,869.

[0302] DNA nanoballs can also be used in combination with methods, systems, compositions and kits as described herein. Methods for creating and using DNA nanoballs for genomic sequencing can be found at, for example, US patents and publications U.S. Pat. No. 7,910,354, 2009/0264299, 2009/0011943, 2009/0005252, 2009/0155781, 2009/0118488 and as described in, for example, Drmanac et al. (2010, Science 327(5961): 78-81). Briefly, following production of modified target nucleic acids, the modified target nucleic acids are circularized and amplified by rolling circle amplification (Lizardi et al., 1998. Nat. Genet. 19:225-232; US 2007/0099208 A1). The extended concatemeric structure of the amplicons promotes coiling creates compact DNA nanoballs. The DNA nanoballs can be captured on substrates, preferably to create an ordered or patterned array such that distance between each nanoball is maintained thereby allowing sequencing of the separate DNA nanoballs. In some embodiments such as those used by Complete Genomics (Mountain View, Calif.), consecutive rounds of adapter addition, amplification, and digestion are carried out prior to circularization to produce head to tail constructs having several target nucleic acids separated by adapter sequences.

[0303] Exemplary isothermal amplification methods that may be used in a method of the present disclosure include, but are not limited to, Multiple Displacement Amplification (MDA) as exemplified by, for example Dean et al., Proc. Natl. Acad. Sci. USA 99:5261-66 (2002) or isothermal strand displacement nucleic acid amplification exemplified by, for example U.S. Pat. No. 6,214,587. Other non-PCR-based methods that may be used in the present disclosure include, for example, strand displacement amplification (SDA) which is described in, for example Walker et al., Molecular Methods for Virus Detection, Academic Press, Inc., 1995; U.S. Pat. Nos. 5,455,166, and 5,130,238, and Walker et al., Nucl. Acids Res. 20:1691-96 (1992) or hyper-branched strand displacement amplification which is described in, for example Lage et al., Genome Res. 13:294-307 (2003). Isothermal amplification methods may be used with, for instance, the strand-displacing Phi 29 polymerase or Bst DNA polymerase large fragment, 5′->3′ exo—for random primer amplification of genomic DNA. The use of these polymerases takes advantage of their high processivity and strand displacing activity. High processivity allows the polymerases to produce fragments that are 10-20 kb in length. As set forth above, smaller fragments may be produced under isothermal conditions using polymerases having low processivity and strand-displacing activity such as Klenow polymerase. Additional description of amplification reactions, conditions and components are set forth in detail in the disclosure of U.S. Pat. No. 7,670,810.

[0304] In some embodiments, isothermal amplification can be performed using kinetic exclusion amplification (KEA), also referred to as exclusion amplification (ExAmp). A nucleic acid library of the present disclosure can be made using a method that includes a step of reacting an amplification reagent to produce a plurality of amplification sites that each includes a substantially clonal population of amplicons from an individual target nucleic acid that has seeded the site. In some embodiments, the amplification reaction proceeds until a sufficient number of amplicons are generated to fill the capacity of the respective amplification site. Filling an already seeded site to capacity in this way inhibits target nucleic acids from landing and amplifying at the site thereby producing a clonal population of amplicons at the site. In some embodiments, apparent clonality can be achieved even if an amplification site is not filled to capacity prior to a second target nucleic acid arriving at the site. Under some conditions, amplification of a first target nucleic acid can proceed to a point that a sufficient number of copies are made to effectively outcompete or overwhelm production of copies from a second target nucleic acid that is transported to the site. For example, in an embodiment that uses a bridge amplification process on a circular feature that is smaller than 500 nm in diameter, it has been determined that after 14 cycles of exponential amplification for a first target nucleic acid, contamination from a second target nucleic acid at the same site will produce an insufficient number of contaminating amplicons to adversely impact sequencing-by-synthesis analysis on an Illumina sequencing platform.

[0305] In some embodiments, amplification sites in an array can be, but need not be, entirely clonal. Rather, for some applications, an individual amplification site can be predominantly populated with amplicons from a first modified target nucleic acid and can also have a low level of contaminating amplicons from a second modified target nucleic acid. An array can have one or more amplification sites that have a low level of contaminating amplicons so long as the level of contamination does not have an unacceptable impact on a subsequent use of the array. For example, when the array is to be used in a detection application, an acceptable level of contamination would be a level that does not impact signal to noise or resolution of the detection technique in an unacceptable way. Accordingly, apparent clonality will generally be relevant to a particular use or application of an array made by the methods set forth herein. Exemplary levels of contamination that can be acceptable at an individual amplification site for particular applications include, but are not limited to, at most 0.1%, 0.5%, 1%, 5%, 10% or 25% contaminating amplicons. An array can include one or more amplification sites having these exemplary levels of contaminating amplicons. For example, up to 5%, 10%, 25%, 50%, 75%, or even 100% of the amplification sites in an array can have some contaminating amplicons. It will be understood that in an array or other collection of sites, at least 50%, 75%, 80%, 85%, 90%, 95% or 99% or more of the sites can be clonal or apparently clonal.

[0306] In some embodiments, kinetic exclusion can occur when a process occurs at a sufficiently rapid rate to effectively exclude another event or process from occurring. Take for example the making of a nucleic acid array where sites of the array are randomly seeded with modified target nucleic acids from a solution and copies of the modified target nucleic acids are generated in an amplification process to fill each of the seeded sites to capacity. In accordance with the kinetic exclusion methods of the present disclosure, the seeding and amplification processes can proceed simultaneously under conditions where the amplification rate exceeds the seeding rate. As such, the relatively rapid rate at which copies are made at a site that has been seeded by a first target nucleic acid will effectively exclude a second nucleic acid from seeding the site for amplification. Kinetic exclusion amplification methods can be performed as described in detail in the disclosure of U.S. Pat. Appl. Pub. No. 2013/0338042.

[0307] Kinetic exclusion can exploit a relatively slow rate for initiating amplification (e.g., a slow rate of making a first copy of a modified target nucleic acids) vs. a relatively rapid rate for making subsequent copies of the modified target nucleic acids (or of the first copy of the modified target nucleic acids). In the example of the previous paragraph, kinetic exclusion occurs due to the relatively slow rate of modified target nucleic acids seeding (e.g., relatively slow diffusion or transport) vs. the relatively rapid rate at which amplification occurs to fill the site with copies of the modified target nucleic acid seed. In another exemplary embodiment, kinetic exclusion can occur due to a delay in the formation of a first copy of a modified target nucleic acid that has seeded a site (e.g., delayed or slow activation) vs. the relatively rapid rate at which subsequent copies are made to fill the site. In this example, an individual site may have been seeded with several different modified target nucleic acids (e.g., several modified target nucleic acids can be present at each site prior to amplification). However, first copy formation for any given modified target nucleic acid can be activated randomly such that the average rate of first copy formation is relatively slow compared to the rate at which subsequent copies are generated. In this case, although an individual site may have been seeded with several different modified target nucleic acids, kinetic exclusion will allow only one of those to be amplified. More specifically, once a first modified target nucleic acid has been activated for amplification, the site will rapidly fill to capacity with its copies, thereby preventing copies of a second modified target nucleic acid from being made at the site.

[0308] In one embodiment, the method is carried out to simultaneously (i) transport modified target nucleic acids to amplification sites at an average transport rate, and (ii) amplify the modified target nucleic acids that are at the amplification sites at an average amplification rate, wherein the average amplification rate exceeds the average transport rate (U.S. Pat. No. 9,169,513). Accordingly, kinetic exclusion can be achieved in such embodiments by using a relatively slow rate of transport. For example, a sufficiently low concentration of modified target nucleic acids can be selected to achieve a desired average transport rate, lower concentrations resulting in slower average rates of transport. Alternatively or additionally, a high viscosity solution and/or presence of molecular crowding reagents in the solution can be used to reduce transport rates. Examples of useful molecular crowding reagents include, but are not limited to, polyethylene glycol (PEG), ficoll, dextran, or polyvinyl alcohol. Exemplary molecular crowding reagents and formulations are set forth in U.S. Pat. No. 7,399,590. Another factor that can be adjusted to achieve a desired transport rate is the average size of the target nucleic acids.

[0309] An amplification reagent can include further components that facilitate amplicon formation, and in some cases increase the rate of amplicon formation. An example is a recombinase. Recombinase can facilitate amplicon formation by allowing repeated invasion/extension. More specifically, recombinase can facilitate invasion of a modified target nucleic acid by the polymerase and extension of a primer by the polymerase using the modified target nucleic acid as a template for amplicon formation. This process can be repeated as a chain reaction where amplicons produced from each round of invasion/extension serve as templates in a subsequent round. The process can occur more rapidly than standard PCR since a denaturation cycle (e.g., via heating or chemical denaturation) is not required. As such, recombinase-facilitated amplification can be carried out isothermally. It is generally desirable to include ATP, or other nucleotides (or in some cases non-hydrolyzable analogs thereof) in a recombinase-facilitated amplification reagent to facilitate amplification. A mixture of recombinase and single-stranded binding (SSB) protein is particularly useful as SSB can further facilitate amplification. Exemplary formulations for recombinase-facilitated amplification include those sold commercially as TwistAmp kits by TwistDx (Cambridge, UK). Useful components of recombinase-facilitated amplification reagent and reaction conditions are set forth in U.S. Pat. Nos. 5,223,414 and 7,399,590.

[0310] Another example of a component that can be included in an amplification reagent to facilitate amplicon formation and in some cases to increase the rate of amplicon formation is a helicase. Helicase can facilitate amplicon formation by allowing a chain reaction of amplicon formation. The process can occur more rapidly than standard PCR since a denaturation cycle (e.g., via heating or chemical denaturation) is not required. As such, helicase-facilitated amplification can be carried out isothermally. A mixture of helicase and single-stranded binding (SSB) protein is particularly useful as SSB can further facilitate amplification. Exemplary formulations for helicase-facilitated amplification include those sold commercially as IsoAmp kits from Biohelix (Beverly, MA). Further, examples of useful formulations that include a helicase protein are described in U.S. Pat. Nos. 7,399,590 and 7,829,284.

[0311] Yet another example of a component that can be included in an amplification reagent to facilitate amplicon formation and in some cases increase the rate of amplicon formation is an origin binding protein.

### Methods of Sequencing

[0312] Following attachment of modified target nucleic acids to a surface, the sequence of the immobilized and amplified modified target nucleic acids is determined. Sequencing can be carried out using any suitable sequencing technique, and methods for determining the sequence of immobilized and amplified modified target nucleic acids, including strand re-synthesis, are known in the art and are described in, for instance, Bignell et al. (U.S. Pat. No. 8,053,192), Gunderson et al. (WO2016/130704), Shen et al. (U.S. Pat. No. 8,895,249), and Pipenburg et al. (U.S. Pat. No. 9,309,502).

[0313] The methods described herein can be used in conjunction with a variety of nucleic acid sequencing techniques. Particularly applicable techniques are those wherein nucleic acids are attached at fixed locations in an array such that their relative positions do not change and wherein the array is repeatedly imaged. Embodiments in which images are obtained in different color channels, for example, coinciding with different labels used to distinguish one nucleotide base type from another are particularly applicable. In some embodiments, the process to determine the nucleotide sequence of a modified target nucleic acid can be an automated process. Preferred embodiments include sequencing-by-synthesis (“SBS”) techniques.

[0314] SBS techniques generally involve the enzymatic extension of a nascent nucleic acid strand through the iterative addition of nucleotides against a template strand. In traditional methods of SBS, a single nucleotide monomer may be provided to a target nucleotide in the presence of a polymerase in each delivery. However, in the methods described herein, more than one type of nucleotide monomer can be provided to a target nucleic acid in the presence of a polymerase in a delivery.

[0315] In one embodiment, a nucleotide monomer includes locked nucleic acids (LNAs) or bridged nucleic acids (BNAs). The use of LNAs or BNAs in a nucleotide monomer increases hybridization strength between a nucleotide monomer and a sequencing primer sequence present on an immobilized modified modified target nucleic acid.

[0316] SBS can use nucleotide monomers that have a terminator moiety or those that lack any terminator moieties. Methods using nucleotide monomers lacking terminators include, for example, pyrosequencing and sequencing using y-phosphate-labeled nucleotides, as set forth in further detail herein. In methods using nucleotide monomers lacking terminators, the number of nucleotides added in each cycle is generally variable and dependent upon the template sequence and the mode of nucleotide delivery. For SBS techniques that use nucleotide monomers having a terminator moiety, the terminator can be effectively irreversible under the sequencing conditions used as is the case for traditional Sanger sequencing which utilizes dideoxynucleotides, or the terminator can be reversible as is the case for sequencing methods developed by Solexa (now Illumina, Inc.).

[0317] SBS techniques can use nucleotide monomers that have a label moiety or those that lack a label moiety. Accordingly, incorporation events can be detected based on a characteristic of the label, such as fluorescence of the label; a characteristic of the nucleotide monomer such as molecular weight or charge; a byproduct of incorporation of the nucleotide, such as release of pyrophosphate; or the like. In embodiments where two or more different nucleotides are present in a sequencing reagent, the different nucleotides can be distinguishable from each other, or alternatively the two or more different labels can be the indistinguishable under the detection techniques being used. For example, the different nucleotides present in a sequencing reagent can have different labels and they can be distinguished using appropriate optics as exemplified by the sequencing methods developed by Solexa (now Illumina, Inc.).

[0318] Preferred embodiments include pyrosequencing techniques. Pyrosequencing detects the release of inorganic pyrophosphate (PPi) as particular nucleotides are incorporated into the nascent strand (Ronaghi, M., Karamohamed, S., Pettersson, B., Uhlen, M. and Nyren, P. (1996) “Real-time DNA sequencing using detection of pyrophosphate release.” Analytical Biochemistry 242(1), 84-9; Ronaghi, M. (2001) “Pyrosequencing sheds light on DNA sequencing.” Genome Res. 11(1), 3-11; Ronaghi, M., Uhlen, M. and Nyren, P. (1998) “A sequencing method based on real-time pyrophosphate.” Science 281(5375), 363; U.S. Pat. Nos. 6,210,891; 6,258,568 and 6,274,320). In pyrosequencing, released PPi can be detected by being immediately converted to adenosine triphosphate (ATP) by ATP sulfurase, and the level of ATP generated is detected via luciferase-produced photons. The nucleic acids to be sequenced can be attached to features in an array and the array can be imaged to capture the chemiluminescent signals that are produced due to incorporation of a nucleotides at the features of the array. An image can be obtained after the array is treated with a particular nucleotide type (e.g., A, T, C or G). Images obtained after addition of each nucleotide type will differ with regard to which features in the array are detected. These differences in the image reflect the different sequence content of the features on the array. However, the relative locations of each feature will remain unchanged in the images.

[0319] The images can be stored, processed and analyzed using the methods set forth herein. For example, images obtained after treatment of the array with each different nucleotide type can be handled in the same way as exemplified herein for images obtained from different detection channels for reversible terminator-based sequencing methods.

[0320] In another exemplary type of SBS, cycle sequencing is accomplished by stepwise addition of reversible terminator nucleotides containing, for example, a cleavable or photobleachable dye label as described, for example, in WO 04/018497 and U.S. Pat. No. 7,057,026. This approach is being commercialized by Solexa (now Illumina Inc.), and is also described in WO 91/06678 and WO 07/123,744. The availability of fluorescently-labeled terminators in which both the termination can be reversed and the fluorescent label cleaved facilitates efficient cyclic reversible termination (CRT) sequencing. Polymerases can also be co-engineered to efficiently incorporate and extend from these modified nucleotides.

[0321] In some reversible terminator-based sequencing embodiments, the labels do not substantially inhibit extension under SBS reaction conditions. However, the detection labels can be removable, for example, by cleavage or degradation. Images can be captured following incorporation of labels into arrayed nucleic acid features. In particular embodiments, each cycle involves simultaneous delivery of four different nucleotide types to the array and each nucleotide type has a spectrally distinct label. Four images can then be obtained, each using a detection channel that is selective for one of the four different labels. Alternatively, different nucleotide types can be added sequentially and an image of the array can be obtained between each addition step. In such embodiments, each image will show nucleic acid features that have incorporated nucleotides of a particular type. Different features will be present or absent in the different images due the different sequence content of each feature. However, the relative position of the features will remain unchanged in the images. Images obtained from such reversible terminator-SBS methods can be stored, processed and analyzed as set forth herein. Following the image capture step, labels can be removed and reversible terminator moieties can be removed for subsequent cycles of nucleotide addition and detection. Removal of the labels after they have been detected in a particular cycle and prior to a subsequent cycle can provide the advantage of reducing background signal and crosstalk between cycles. Examples of useful labels and removal methods are set forth herein.

[0322] In particular embodiments some or all of the nucleotide monomers can include reversible terminators. In such embodiments, reversible terminators/cleavable fluorophores can include fluorophores linked to the ribose moiety via a 3′ ester linkage (Metzker, Genome Res. 15:1767-1776 (2005)). Other approaches have separated the terminator chemistry from the cleavage of the fluorescence label (Ruparel et al., Proc Natl Acad Sci USA 102: 5932-7 (2005)). Ruparel et al. described the development of reversible terminators that used a small 3′ allyl group to block extension, but could easily be deblocked by a short treatment with a palladium catalyst. The fluorophore was attached to the base via a photocleavable linker that could easily be cleaved by a 30 second exposure to long wavelength UV light. Thus, either disulfide reduction or photocleavage can be used as a cleavable linker. Another approach to reversible termination is the use of natural termination that ensues after placement of a bulky dye on a dNTP. The presence of a charged bulky dye on the dNTP can act as an effective terminator through steric and/or electrostatic hindrance. The presence of one incorporation event prevents further incorporations unless the dye is removed. Cleavage of the dye removes the fluorophore and effectively reverses the termination. Examples of modified nucleotides are also described in U.S. Pat. Nos. 7,427,673, and 7,057,026.

[0323] Additional exemplary SBS systems and methods which can be used with the methods and systems described herein are described in U.S. Pub. Nos. 2007/0166705, 2006/0188901, 2006/0240439, 2006/0281109, 2012/0270305, and 2013/0260372, U.S. Pat. No. 7,057,026, PCT Publication No. WO 05/065814, U.S. Patent Application Publication No. 2005/0100900, and PCT Publication Nos. WO 06/064199 and WO 07/010,251.

[0324] Some embodiments can use detection of four different nucleotides using fewer than four different labels. For example, SBS can be performed using methods and systems described in the incorporated materials of U.S. Pub. No. 2013/0079232. As a first example, a pair of nucleotide types can be detected at the same wavelength, but distinguished based on a difference in intensity for one member of the pair compared to the other, or based on a change to one member of the pair (e.g., via chemical modification, photochemical modification or physical modification) that causes apparent signal to appear or disappear compared to the signal detected for the other member of the pair. As a second example, three of four different nucleotide types can be detected under particular conditions while a fourth nucleotide type lacks a label that is detectable under those conditions, or is minimally detected under those conditions (e.g., minimal detection due to background fluorescence, etc.). Incorporation of the first three nucleotide types into a nucleic acid can be determined based on presence of their respective signals and incorporation of the fourth nucleotide type into the nucleic acid can be determined based on absence or minimal detection of any signal. As a third example, one nucleotide type can include label(s) that are detected in two different channels, whereas other nucleotide types are detected In no more than one of the channels. The aforementioned three exemplary configurations are not considered mutually exclusive and can be used in various combinations. An exemplary embodiment that combines all three examples, is a fluorescent-based SBS method that uses a first nucleotide type that is detected in a first channel (e.g., dATP having a label that is detected in the first channel when excited by a first excitation wavelength), a second nucleotide type that is detected in a second channel (e.g., dCTP having a label that is detected in the second channel when excited by a second excitation wavelength), a third nucleotide type that is detected in both the first and the second channel (e.g., dTTP having at least one label that is detected in both channels when excited by the first and/or second excitation wavelength) and a fourth nucleotide type that lacks a label that is not, or minimally, detected in either channel (e.g., dGTP having no label).

[0325] Further, as described in U.S. Pub. No. 2013/0079232, sequencing data can be obtained using a single channel. In such so-called one-dye sequencing approaches, the first nucleotide type is labeled but the label is removed after the first image is generated, and the second nucleotide type is labeled only after a first image is generated. The third nucleotide type retains its label in both the first and second images, and the fourth nucleotide type remains unlabeled in both images.

[0326] Some embodiments can use sequencing by ligation techniques. Such techniques use DNA ligase to incorporate oligonucleotides and identify the incorporation of such oligonucleotides. The oligonucleotides typically have different labels that are correlated with the identity of a particular nucleotide in a sequence to which the oligonucleotides hybridize. As with other SBS methods, images can be obtained following treatment of an array of nucleic acid features with the labeled sequencing reagents. Each image will show nucleic acid features that have incorporated labels of a particular type. Different features will be present or absent in the different images due the different sequence content of each feature, but the relative position of the features will remain unchanged in the images. Images obtained from ligation-based sequencing methods can be stored, processed and analyzed as set forth herein. Exemplary SBS systems and methods which can be utilized with the methods and systems described herein are described in U.S. Pat. Nos. 6,969,488, 6,172,218, and 6,306,597.

[0327] Some embodiments can use nanopore sequencing (Deamer, D. W. & Akeson, M. “Nanopores and nucleic acids: prospects for ultrarapid sequencing.” Trends Biotechnol. 18, 147-151 (2000); Deamer, D. and D. Branton, “Characterization of nucleic acids by nanopore analysis”, Acc. Chem. Res. 35:817-825 (2002); Li, J., M. Gershow, D. Stein, E. Brandin, and J. A. Golovchenko, “DNA molecules and configurations in a solid-state nanopore microscope” Nat. Mater. 2:611-615 (2003)). In such embodiments, the modified target nucleic acid passes through a nanopore. The nanopore can be a synthetic pore or biological membrane protein, such as a-hemolysin. As the modified target nucleic acid passes through the nanopore, each base-pair can be identified by measuring fluctuations in the electrical conductance of the pore. (U.S. Pat. No. 7,001,792; Soni, G. V. & Meller, “A. Progress toward ultrafast DNA sequencing using solid-state nanopores.” Clin. Chem. 53, 1996-2001 (2007); Healy, K. “Nanopore-based single-molecule DNA analysis.” Nanomed. 2, 459-481 (2007); Cockroft, S. L., Chu, J., Amorin, M. & Ghadiri, M. R. “A single-molecule nanopore device detects DNA polymerase activity with single-nucleotide resolution.” J. Am. Chem. Soc. 130, 818-820 (2008)). Data obtained from nanopore sequencing can be stored, processed and analyzed as set forth herein. In particular, the data can be treated as an image in accordance with the exemplary treatment of optical images and other images that is set forth herein.

[0328] Some embodiments can use methods involving the real-time monitoring of DNA polymerase activity. Nucleotide incorporations can be detected through fluorescence resonance energy transfer (FRET) interactions between a fluorophore-bearing polymerase and y-phosphate-labeled nucleotides as described, for example, in U.S. Pat. Nos. 7,329,492 and 7,211,414, or nucleotide incorporations can be detected with zero-mode waveguides as described, for example, in U.S. Pat. No. 7,315,019, and using fluorescent nucleotide analogs and engineered polymerases as described, for example, in U.S. Pat. No. 7,405,281 and U.S. Pub. No. 2008/0108082. The illumination can be restricted to a zeptoliter-scale volume around a surface-tethered polymerase such that incorporation of fluorescently labeled nucleotides can be observed with low background (Levene, M. J. et al. “Zero-mode waveguides for single-molecule analysis at high concentrations.” Science 299, 682-686 (2003); Lundquist, P. M. et al. “Parallel confocal detection of single molecules in real time.” Opt. Lett. 33, 1026-1028 (2008); Korlach, J. et al. “Selective aluminum passivation for targeted immobilization of single DNA polymerase molecules in zero-mode waveguide nano structures.” Proc. Natl. Acad. Sci. USA 105, 1176-1181 (2008)). Images obtained from such methods can be stored, processed and analyzed as set forth herein.

[0329] Some SBS embodiments include detection of a proton released upon incorporation of a nucleotide into an extension product. For example, sequencing based on detection of released protons can use an electrical detector and associated techniques that are commercially available from Ion Torrent (Guilford, CT, a Life Technologies subsidiary) or sequencing methods and systems described in U.S. Pub. Nos. 2009/0026082; 2009/0127589; 2010/0137143; and 2010/0282617. Methods set forth herein for amplifying target nucleic acids using kinetic exclusion can be readily applied to substrates used for detecting protons. More specifically, methods set forth herein can be used to produce clonal populations of amplicons that are used to detect protons.

[0330] The above SBS methods can be advantageously carried out in multiplex formats such that multiple different modified target nucleic acids are manipulated simultaneously. In particular embodiments, different modified target nucleic acids can be treated in a common reaction vessel or on a surface of a particular substrate. This allows convenient delivery of sequencing reagents, removal of unreacted reagents and detection of incorporation events in a multiplex manner. In embodiments using surface-bound target nucleic acids, the modified target nucleic acids can be in an array format. In an array format, the modified target nucleic acids can be typically bound to a surface in a spatially distinguishable manner. The modified target nucleic acids can be bound by direct covalent attachment, attachment to a bead or other particle or binding to a polymerase or other molecule that is attached to the surface. The array can include a single copy of a modified target nucleic acid at each site (also referred to as a feature) or multiple copies having the same sequence can be present at each site or feature. Multiple copies can be produced by amplification methods such as, bridge amplification or emulsion PCR as described in further detail herein.

[0331] The methods set forth herein can use arrays having features at any of a variety of densities including, for example, at least about 10 features/cm², 100 features/cm², 500 features/cm 2, 1,000 features/cm², 5,000 features/cm², 10,000 features/cm², 50,000 features/cm² 100,000 features/cm², 1,000,000 features/cm², 5,000,000 features/cm², or higher.

[0332] An advantage of the methods set forth herein is that they provide for rapid and efficient detection of a plurality of cm², in parallel. Accordingly, the present disclosure provides integrated systems capable of preparing and detecting nucleic acids using techniques known in the art such as those exemplified herein. Thus, an integrated system of the present disclosure can include fluidic components capable of delivering amplification reagents and/or sequencing reagents to one or more immobilized modified target nucleic acids, the system including components such as pumps, valves, reservoirs, fluidic lines and the like. A flow cell can be configured and/or used in an integrated system for detection of target nucleic acids. Exemplary flow cells are described, for example, in U.S. Pat. Nos. 8,241,573 and 8,951,781. As exemplified for flow cells, one or more of the fluidic components of an integrated system can be used for an amplification method and for a detection method. Taking a nucleic acid sequencing embodiment as an example, one or more of the fluidic components of an integrated system can be used for an amplification method set forth herein and for the delivery of sequencing reagents in a sequencing method such as those exemplified above. Alternatively, an integrated system can include separate fluidic systems to carry out amplification methods and to carry out detection methods. Examples of integrated sequencing systems that are capable of creating amplified nucleic acids and also determining the sequence of the nucleic acids include, without limitation, the MiSeq™ platform (Illumina, Inc., San Diego, CA) and devices described in U.S. Pat. No. 8,951,781.

[0333] While the embodiments presented herein are generally described using a sequencing platform (such as a sequencing by synthesis platform) as a readout, one of ordinary skill in the art will recognize that nucleic acids modified by the ACDs presented herein can also be detected using any other suitable readout methodology. For example, the location and identity of modified cytosines can be assessed using a microarray. Any of a variety of analyte arrays (also referred to as “microarrays”) known in the art can be used in a method or system set forth herein. A typical array contains analytes, each having an individual probe or a population of probes. In the latter case, the population of probes at each analyte is typically homogenous having a single species of probe. For example, in the case of a nucleic acid array, each analyte can have multiple nucleic acid molecules each having a common sequence. However, in some implementations the populations at each analyte of an array can be heterogeneous. Similarly, protein arrays can have analytes with a single protein or a population of proteins typically, but not always, having the same amino acid sequence. The probes can be attached to the surface of an array for example, via covalent linkage of the probes to the surface or via non-covalent interaction(s) of the probes with the surface. In some implementations, probes, such as nucleic acid molecules, can be attached to a surface via a gel layer as described, for example, in U.S. patent application Ser. No. 13/784,368 and US Pat. App. Pub. No. 2011/0059865 A1.

[0334] Example arrays include, without limitation, a BeadChip Array available from Illumina, Inc. (San Diego, Calif) or others such as those where probes are attached to beads that are present on a surface (e.g., beads in wells on a surface) such as those described in U.S. Pat. Nos. 6,266,459; 6,355,431; 6,770,441; 6,859,570; or 7,622,294; or PCT Publication No. WO 00/63437. Further examples of commercially available microarrays that can be used include, for example, an Affymetrix® GeneChip® microarray or other microarray synthesized in accordance with techniques sometimes referred to as VLSIPS™ (Very Large Scale Immobilized Polymer Synthesis) technologies. A spotted microarray can also be used in a method or system according to some implementations of the present disclosure. An example spotted microarray is a CodeLink™ Array available from Amersham Biosciences. Another microarray that is useful is one that is manufactured using inkjet printing methods such as SurePrint™ Technology available from Agilent Technologies.

[0335] In a specific embodiment, an ACD as presented herein can be used to convert 5-methyl cytosine (5mC) to thymidine (T) by deamination as described herein, such as by providing a sample of DNA suspected of including single-stranded DNA including at least one 5-methyl cytosine (5mC), at least one 5-hydroxymethyl cytosine (5hmC), at least one 5-formyl cytosine (5fC), at least one 5-carboxy cytosine (5CaC), or a combination thereof; contacting the DNA with the ACD under conditions suitable for conversion of 5-methylcytosine (5mC) to thymidine (T) by deamination at a greater rate than conversion of cytosine (C) to uracil (U) by deamination, to result in converted single-stranded DNA, wherein 5mC, 5hmC, 5fC, and/or 5CaC are converted to T.

[0336] In a specific embodiment, an ACD of the present disclosure can be used to detect 5hmC as described herein, such as by providing a sample of DNA suspected of including single-stranded DNA that has at least one 5-hydroxymethyl cytosine (5hmC); contacting the DNA with the ACD under conditions suitable for conversion of unmodified cytosine to uracil and 5mC to thymidine and no detectable conversion of 5hmC to 5hmU.

[0337] The converted single-stranded DNA can then be processed as needed to facilitate hybridization to a microarray. For example, the converted DNA can be amplified. Any one of a number of amplification methods as are known in the art can be performed. For example, whole-genome amplification or amplification using universal primers that hybridize to a common region in the converted DNA, such as an adaptor sequence, can be used. Additionally or alternatively, the converted DNA can be fragmented. Fragmentation can be performed prior to or following amplification, or in the absence of amplification. Any one of a number of fragmentation methods as are known in the art can be performed. As one example, fragmentation can be performed using an enzymatic process, such as a restriction endonuclease or other enzyme capable of cleaving the converted DNA. As another example, fragmentation can be performed using mechanical means, such as shearing using, for example a sonication device such as those supplied by Covaris. The fragmented converted DNA can then be precipitated and/or resuspended in a buffer suitable for hybridization to a microarray. Following hybridization, the methylation state of regions of interest, such as a specific CpG locus or loci, can be interrogated at specific locations on the microarray. Methods of preparing converted DNA for microarray analysis are known in the art. One example of such methods is described in the Methylation Protocol Guide for the Infinium HD Assay from Illumina (San Diego, CA).

[0338] Whereas such a protocol guide may describe use of a microarray designed for interrogation of bisulfite-converted DNA, it will be understood that array features, specifically probe sequences, can be specifically designed for DNA that has not been bisulfite converted. As an example, a commercially available microarray such as the Infinium MethylationEPIC BeadChip (Illumina) is specifically designed to hybridize with DNA fragments with reduced complexity, as found in bisulfite converted DNA, where most if not all cytosines are converted to thymidine. Thus, for example, the same CpG sites can be interrogated in non-bisulfite-converted DNA by using a microarray including probes designed to hybridize to the same regions of native, non-bisulfite-converted DNA. One of skill in the art could readily obtain such a microarray. In one embodiment, a custom array could be designed using the manifest for an array such as the Infinium MethylationEPIC BeadChip, by using the “Forward Sequence” to identify a probe sequence including native DNA sequence that covers a similar or identical sequence region for the allele-specific probe sequences, which are designed to hybridize to DNA sequences where most or all cytosines have been converted to thymidine. Using such an array designed to hybridize to native (non-bisulfite-converted) DNA sequences, the methodologies and analysis methods described in the Methylation Protocol Guide for the Infinium HD Assay from Illumina (San Diego, CA) could be followed to identify methylated CpG sites in the sample DNA.

### Compositions

[0339] The present disclosure also provides compositions that include an ACD described herein. The composition can include one or more additional other components in addition to the ACD. For example, the other component can include a single-stranded DNA or RNA substrate that includes, or is suspected of including, at least one modified cytosine, such as a 5-methyl cytosine, a 5-hydroxymethyl cytosine, a 5-formyl cytosine (5fC), a 5-carboxy cytosine (5CaC), or a combination thereof. In another example, a single-stranded DNA or RNA substrate can be one including one or more known modified cytosine, e.g., a single-stranded DNA or RNA substrate that can be used as a control to measure conversion efficiency. In another example, the other component can include a buffer, such as a buffer described herein, for example a citrate buffer, a sodium acetate buffer, or a Bis-Tris buffer, or HEPES. In another example, the other component can include a reductant, including but not limited to, DTT and/or TCEP, as well as Zn, or a denaturant, such as DMSO or betaine.

[0340] A composition can include a polynucleotide encoding an ACD described herein. The polynucleotide can be present in a vector, such as a plasmid or virus vector. A vector that includes the polynucleotide can be present in a host cell, such as E. coli.

### Kits

[0341] The present disclosure also provides kits for determining the methylation status of DNA or RNA. A kit includes at least one ACD described herein and one or more other components in a suitable packaging material in an amount sufficient for at least one reaction. Examples of other components include a positive control polynucleotide, such as a single-stranded DNA including one or more known modified cytosines for use in measuring conversion efficiency, or a negative control polynucleotide, such as a single-stranded DNA including unmodified cytosines. Another component can be a glucosyltransferase, such as T4-beta glucosyltransferase. Optionally, other reagents such as buffers and solutions needed to use the ACD and nucleotide solution are also included. Instructions for use of the packaged components are also typically included.

[0342] As used herein, the phrase “packaging material” refers to one or more physical structures used to house the contents of the kit. The packaging material is constructed by known methods, preferably to provide a sterile, contaminant-free environment. The packaging material has a label which indicates that the components can be used for determining the methylation status of DNA or RNA. In addition, the packaging material contains instructions indicating how the materials within the kit are employed to practice a reaction with an ACD. As used herein, the term “package” refers to a solid matrix or material such as glass, plastic, paper, foil, and the like, capable of holding within fixed limits the polypeptides. “Instructions for use” typically include a tangible expression describing the reagent concentration or at least one assay method parameter, such as the relative amounts of reagent and sample to be admixed, maintenance time periods for reagent/sample admixtures, temperature, buffer conditions, and the like.

[0343] The invention is defined in the claims. However, below there is provided a non-exhaustive listing of non-limiting exemplary aspects. Any one or more of the features of these aspects may be combined with any one or more features of another example, embodiment, or aspect described herein.

### EXEMPLARY ASPECTS

[0344] Aspect 1. An altered cytidine deaminase (ACD) having 5hmC-preferring deaminase activity, wherein conversion of 5-hydroxymethyl cytosine (5hmC) to 5-hydroxymethyl uracil (5hmU) by deamination occurs at a greater rate than conversion of 5-methyl cytosine (5mC) to thymidine (T) and cytosine (C) to uracil (U).

[0345] Aspect 2. The ACD of any aspect herein, wherein the ACD comprises one or more substitution mutations, deletions, or insertions that confer 5hmC-preferring deaminase activity.

[0346] Aspect 3. The ACD of any aspect herein, wherein 5hmC-preferring deaminase comprises (a) a substitution mutation at position functionally equivalent to Y130 in a wild-type ACD, wherein the substitution is D; (b) a substitution mutation at position functionally equivalent to Y132 in a wild-type ACD, wherein the substitution is H, R, or K; (c) a substitution mutation at a position functionally equivalent to D133 in a wild-type ACD, wherein the substitution is A, G, S, or T; wherein the wild-type ACD is a wild-type APOBEC3A (SEQ ID NO:3); or (d) a combination of (a) and (c) or a combination of (a), (b), and (c).

[0347] Aspect 4. The ACD of any aspect herein, wherein the ACD comprises SEQ ID NO:139 or a sequence having at least 75% or more sequence identity to SEQ ID NO:139, preferably at least 90%.

[0348] Aspect 5. The ACD of any aspect herein, comprising one or more alterations that enhance the stability of the ACD, wherein the one or more stability-enhancing alterations are selected from substitution mutations at a position functionally equivalent to Al 12X, A126X, A139X, A148X, A185X, A192X, A59X, A87X, C106X, C161X, C171X, C34X, D145X, D156X, D163X, D167X, D177X, D180X, D41X, D77X, D85X, E109X, E116X, E138X, E157X, E38X, G105X, G108X, G188X, G25X, G27X, H119X, H11X, H16X, H182X, H29X, H51LX, I17X, I26X, I89X, K47X, K60X, L135X, L62X, L78X, M14X, M48X, N117X, N196X, N21X, N42X, P80X, Q115X, Q141X, Q169X, Q184X, R111X, R123X, R189X, R39X, R74X, R91X, S103X, S183X, S187X, S20X, S45X, T118X, T164X, T19X, T31X, T93X, V110X, V79X, L12X, D14X, T19X, G27X, R28X, E38X, F54X, H56X, N57X, Y67X, L73X, D77X, S81X, Y90X, I96X, S97X, C101X, F102X, W104X, C106X, A107X, L114X, V120X, L122X, R128X, Y136X, M142X, A146X, K159X, C161X, L186X, a deletion selected from ΔM1-L12, ΔE36-G53, ΔN61-G68, ΔW104-G105, ΔQ195-N199, or ΔI26-G27, and combinations thereof, wherein the position number designation is functionally equivalent to the position in a wild-type APOBEC3A (SEQ ID NO:3), and X is an amino acid substitution different from the wild-type amino acid at that position.

[0349] Aspect 6. The ACD of any aspect herein, wherein the one or more stability-enhancing alterations are selected from substitution mutations at a position functionally equivalent to a mutation identified as stabilizing in Table 5.

[0350] Aspect 7. The ACD any aspect herein, wherein the one or more stability-enhancing alterations comprises a deletion selected from Table 6.

[0351] Aspect 8. The ACD of any aspect herein, wherein the one or more stability-enhancing alterations comprises at least one substitution and at least one deletion, wherein the substitution mutation is at a position functionally equivalent to a stability-enhancing mutation selected from Table 5, and the deletion is a deletion selected from Table 6.

[0352] Aspect 9. The ACD of any aspect herein, wherein the one or more stability-enhancing alterations comprise a deletion selected from Table 6 and one or more ancillary substitution mutations.

[0353] Aspect 10. The ACD of any aspect herein, wherein the deletion and one or more ancillary substitution mutations of the ACD is AN61-G68/Δ59P/K60R, AN61-G68/Δ59L/R69Y, AN61-G68/Δ59L/K60E/R69N, AN61-G68/Δ59P/K60E/R69H, AN61-G68/Δ59P/K60Q/R69H, AN61-G68/Δ59L/R69N, AN61-G68/R69D, AN61-G68/Δ59L/K60R, AN61-G68/Δ59P/K60G/R69L, AW104-G105/F102R, AW104-G105/S103N, AW104-G105/F102R/S103N, AW104-G105/Δ1-12, AW104-G105/Δ1-12/F102R, AW104-G105/Δ1-12/S103N or AW104-G105/Δ1-12/F102R/S103N.

[0354] Aspect 11. The ACD of any aspect herein, wherein the ACD comprises a combination of stability-enhancing alterations selected from Table 7 or 8.

[0355] Aspect 12. The ACD of any aspect herein, wherein the ACD comprises: a. three or more stability-enhancing alterations, b. four or more stability-enhancing alterations, c. five or more stability-enhancing alterations, d. six or more stability-enhancing alterations, e. seven or more stability-enhancing alterations, f. eight or more stability-enhancing alterations, g. nine or more stability-enhancing alterations, h. ten or more stability-enhancing alterations, i. eleven or more stability-enhancing alterations, or k. twelve or more stability-enhancing alterations.

[0356] Aspect 13. The ACD of any aspect herein, wherein the ACD comprises 1. thirteen or more stability-enhancing alterations, or m. fourteen or more stability-enhancing alterations.

[0357] Aspect 14. The ACD of any aspect herein, comprising one or more alterations that enhance the stability of an ACD for 5hmC, comprising one or more stability-enhancing alterations selected from I17T, T19Y, G25K, S45W, A59P, K60R, deletion of 61-68, R74L, deletion of W104, deletion of G105, G108C, A126C, C171 Å, G188R, or a combination thereof

[0358] Aspect 15. The ACD of any aspect herein, comprising one or more alterations that enhance the stability of an ACD for 5hmC, comprising stability-enhancing alterations I17T, T19Y, G25K, S45W, A59P, K60R, deletion of 61-68, R74L, deletion of W104, deletion of G105, G108C, C171 Å, and G188R.

[0359] Aspect 16. The ACD of any aspect herein, comprising one or more alterations that enhance the stability of an ACD for 5hmC, comprising stability-enhancing alterations I17T, T19Y, G25K, S45W, A59P, K60R, deletion of 61-68, R74L, G108C, C171 Å, and G188R.

[0360] Aspect 17. The ACD of any aspect herein, comprising one or more alterations that enhance the stability of an ACD for 5hmC, comprising I17T, T19Y, G25K, S45W, A59P, K60R, deletion of 61-68, R74L, deletion of G105, G108C, C171 Å, and G188R.

[0361] Aspect 18. The ACD of any aspect herein, wherein the ACD is based on a member of the AID subfamily, the APOBECI subfamily, the APOBEC2 subfamily, the APOBEC3A subfamily, the APOBEC3B subfamily, the APOBEC3C subfamily, the APOBEC3D subfamily, the APOBEC3F subfamily, the APOBEC3G subfamily, the APOBEC3H subfamily, or the APOBEC4 subfamily.

[0362] Aspect 19. The ACD of any aspect herein, wherein the wherein the ACD is APOBEC3A (SEQ ID NO:3) further comprising one or more alterations that confer the 5hmC-preferring deaminase activity.

[0363] Aspect 20. The ACD of any aspect herein, wherein the ACD comprises a ZDD motif H-[P/A/V]-E-X[23-28]-P-C-X[2-4]-C (SEQ ID NO:12), and wherein the ACD is a member of the APOBEC3A subfamily and comprises X[16-26]-GRXXTXLCYXV-X15-GXXXN-X12-HAEXXF-X14-YXXTWXXSWSPC-X[2-4]-CA-X5-FL-X7-LXIXXXR(L/I)Y-X8-GLXXLXXXG-X5-M-X4-FXXCWXXFV-X6-FXPW-X13-LXXI-X[2-6](SEQ ID NO:14), or a combination thereof.

[0364] Aspect 21. A dimerized altered cytidine deaminase (dACD) comprising a first cytidine deaminase comprising the ACD of any aspect herein and a second cytidine deaminase.

[0365] Aspect 22. A polynucleotide encoding the ACD of any aspect herein.

[0366] Aspect 23. A composition comprising the ACD of any aspect herein and a buffer.

[0367] Aspect 24. The composition of any aspect herein, wherein the composition further comprises a sample comprising DNA comprising at least one modified cytosine, wherein the modified cytosine is 5-methyl cytosine (5mC), 5-hydroxymethyl cytosine (5hmC), 5-formyl cytosine (5fC), 5-carboxy cytosine (5caC), or a combination thereof.

[0368] Aspect 25. The composition of any aspect herein, wherein the DNA comprises single-stranded DNA.

[0369] Aspect 26. The composition of any aspect herein, wherein the sample comprises genomic DNA or cell free DNA.

[0370] Aspect 27. The composition of any aspect herein, wherein the genomic DNA is from a single cell or is a mixture from a plurality of cells.

[0371] Aspect 28. A method comprising: providing a sample of DNA suspected of comprising single-stranded DNA comprising at least one 5-hydroxymethyl cytosine (5hmC); contacting the single-stranded DNA with an ACD under conditions suitable for conversion of 5hmC to 5hmU at a greater rate than conversion of 5-methylcytosine (5mC) to thymidine (T) and cytosine (C) to uracil (U) by deamination, to result in converted single-stranded DNA, wherein the ACD is the ACD of any aspect herein; and processing the converted single-stranded DNA to produce a sequencing library.

[0372] Aspect 29. The method of any aspect herein, wherein the method further comprises, before the providing, denaturing double-stranded DNA present in the sample to result in single-stranded DNA.

[0373] Aspect 30. A method comprising: providing a sample of DNA suspected of comprising double-stranded DNA comprising at least one 5-hydroxymethyl cytosine (5hmC); processing the double-stranded DNA to produce a sequencing library; denaturing the sequencing library to result in a single-stranded DNA; contacting the single-stranded DNA with an ACD under conditions suitable for conversion of 5hmC to 5hmU at a greater rate than conversion of 5-methylcytosine (5mC) to thymidine (T) and cytosine (C) to uracil (U) by deamination, to result in converted single-stranded DNA, wherein the altered cytidine deaminase is the ACD of any aspect herein; and converting the converted single-stranded DNA to a converted double-stranded DNA sequencing library.

[0374] Aspect 31. The method of any aspect herein, wherein the processing comprises fragmentation or tagmentation of the double-stranded DNA and addition of a universal sequence to the double-stranded DNA fragments.

[0375] Aspect 32. The method of any aspect herein, wherein the universal sequence is part of an adapter added to the double-stranded DNA fragments.

[0376] Aspect 33. The method of any aspect herein, wherein the converting comprises amplifying the converted single-stranded DNA to be the converted double-stranded DNA.

[0377] Aspect 34. The method of any aspect herein, wherein the sample is a biological sample.

[0378] Aspect 35. The method of any aspect herein, wherein the biological sample comprises cell-free DNA.

[0379] Aspect 36. The method of any aspect herein, wherein the biological sample comprises a fluid selected from blood or serum.

[0380] Aspect 37. The method any aspect herein, wherein the sample comprises single cells or isolated nuclei.

[0381] Aspect 38. The method of any aspect herein, wherein the biological sample comprises a tissue.

[0382] Aspect 39. The method of any aspect herein, wherein the tissue comprises tumor tissue.

[0383] Aspect 40. The method of any aspect herein, further comprising: providing a surface comprising a plurality of amplification sites, wherein the amplification sites comprise at least two populations of attached single-stranded capture oligonucleotides having a free 3′ end, and contacting the surface comprising amplification sites with the sequencing library under conditions suitable to produce a plurality of amplification sites that each comprise a clonal population of amplicons from an individual member of the sequencing library.

[0384] Aspect 40. The method of any aspect herein, further comprising: providing a surface comprising a plurality of amplification sites, wherein the amplification sites comprise at least two populations of attached single-stranded capture oligonucleotides having a free 3′ end; and contacting the surface comprising amplification sites with the converted double-stranded DNA sequencing library under conditions suitable to produce a plurality of amplification sites that each comprise a clonal population of amplicons from an individual member of the converted double-stranded DNA sequencing library.

### EXAMPLES

[0385] The present disclosure is illustrated by the following examples. It is to be understood that the particular examples, materials, amounts, and procedures are to be interpreted broadly in accordance with the scope and spirit of the disclosure as set forth herein.

### Example 1

[0386] Detection of 5mC and 5hmC

[0387] Human genomic DNA is combined with fully unmethylated lambda control DNA (New England Biolabs) and enzymatically CpG methylated pUC19 control DNA and mechanically sheared to give fragments of approximately ˜300 bp. This sheared DNA (10-100ng) is then subjected to end-repair, A-tailing and adapter ligation according to standard Illumina library preparation procedures. The sample is then split into 2 aliquots to enable differential treatment.

[0388] One of the aliquots of the adapter-ligated DNA is glucosylated using UDP-glucose and T4 β-glucosyltransferase (OGT, NEB). Specifically, the sample is treated with 0.5 U/uL of T4 βGT (NEB) in 1X CutSmart Buffer (NEB) with 40 μM UDP-Glucose at 37° C. for 3 hr. A control reaction is assembled using the other aliquot of the DNA sample, omitting the T4 βGT enzyme. Subsequently, the samples are optionally SPRI purified and then denatured via incubation in 0.02 N sodium hydroxide at 50° C. for 10 minutes. Subsequently, ssDNA samples are enzymatically deaminated in 50 mM Bis-Tris (pH 6.5), 10 μg/mL RNAse A with the cytidine deaminase (200 nM) for 25 minutes at 37 C. The libraries are then PCR amplified using unique-dual indexing primers and Q5U (New England Biolabs) using 9 cycles of PCR. Samples are sequenced on a NovaSeq6000 and analysis is performed with DRAGEN Methylation Pipeline. The methylation calls between the two treatment conditions (+/−T4 βGT) are compared in order to determine which sites were hydroxymethylated. Bases that are detected as methylated in both sample treatments are assigned mC, whereas bases that are detected as methylated in the -OGT condition and unmethylated in the +βGT condition are assigned hmC (FIG. 4).

### Example 2

### Protein Expression and Purification.

[0389] Constructs containing coding regions encoding altered cytidine deaminases (ACDs) with substitutions mutations predicted to increase stability were produced. The substitutions mutations were present in a scaffold having Y130A/Y132H/C171A (ScB, SEQ ID NO:68). Constructs were transformed using BL21(DE3) cells and expressed in 50 mL of autoinduction media composed by terrific broth, 0.2% lactose, and kanamycin. The cultures were incubated at 37° C. for 6h, and then 16° C. overnight. The cell pellets were harvested by centrifugation, resuspended in BugBuster® Protein Extraction Reagent and proteins were purified using HisPur™ Ni-NTA spin columns. The eluates were desalted into 20 mM Tris, 200 mM NaCl, 1 mM DTT, 5% glycerol, and 0.01% tween, and concentrated to ˜2 mg/mL. Analysis by SDS-PAGE gel revealed the purity to be ˜70-80%.

### Tm Measurement (FIG. 6A).

[0390] The melting temperature (Tₘ) of the constructs was determined by DSF (differential scanning fluorimetry). Samples were diluted to 1 mg/mL in storage buffer (20 mM Tris, 200 mM NaCl, 1 mM DTT, 5% glycerol and 0.01% tween pH 7.5) and measured in duplicate with a temperature range from 25-100 C and a heating rate of 1° C./min. Analysis of the minimum of differential curves allowed determination of the Tm.

LC/MS Activity Assay with Temperature Profile (FIG. 6B).

[0391] Temperature profiles for 5mC and C conversion were determined for each stability mutant using an LC/MS assay. In a typical assay, 1 μM final concentration of enzyme was incubated with 250 nM methylated substrate at 6 different temperatures (30, 35, 40, 45, 50, and 55° C.) for 60 minutes. Reactions were quenched by heating at 95° C. for 5 minutes. The DNA was purified by desalting using ZYMO Oligo Clean and Concentrator followed by digestion using NEB Nucleoside Digestion Mix at 37° C. overnight. The digested samples were analyzed by LC/MS on an Agilent Triple Quadrupole, and the single nucleotides quantified by MS/MS. The fraction of 5mC or dC converted was determined based on the relative amounts of 5mdC, dC, dT and dU compared to the untreated substrate.

### SUMMARY

[0392] FIGS. 6A and 6B show the results of selected substitution mutations evaluated when present in the scaffold Y130A/Y132H/C171A (ScB, SEQ ID NO:68). Table 5 includes the results shown in FIG. 6A. FIGS. 8 and 9 show the summary of the mutations tested as described in Examples 2, 3, and 4.

### Example 3

### Protein Expression and Purification.

[0393] Constructs containing coding regions encoding ACDs with substitutions mutations predicted to increase stability were produced. The substitutions mutations were present in a scaffold having Y130A/Y132H/D133W/R74L/T19Y/C171A (ScE, SEQ ID NO:72). Constructs were transformed in BL21 (DE3) and expressed at 37° C. for 6h, and then incubated overnight at room temperature with autoinduction media (terrific broth supplemented with kanamycin and 0.2% lactose) in a 96 deep well plate. The cell pellets were harvested by centrifugation, and then resuspended in BugBuster® Protein Extraction Reagent. The lysates were purified using Dynabeads® Ni-NTA and eluted in 50 mM Tris, 300 mM NaCl, 250 mM imidazole, 5% glycerol and 0.01% tween using a KingFisher (Thermofisher) automated instrument. Top hits (downselected from initial screen and moved forward to NGS assay) were expressed and purified using spin columns as previously described for Example 2.

### Activity-Based Screen Using LC/MS (FIG. 7A).

[0394] Purified libraries were screened for activity using an LC/MS assay. Reactions containing 2 μL of enzyme and 250 nM methylated substrate were incubated for 60 minutes in 5 different conditions: reaction buffer (50 mM Tris, 1 mM DTT) at 37 and 45° C., reaction buffer with additives (20% DMSO, 2M betaine) at 37 and 45° C., and reaction buffer with a 10 minute incubation at 45° C. prior to 60 minute incubation at 37° C. Reactions were stopped by incubation at 95° C. for 5 minutes. The DNA was purified by desalting using ZYMO Oligo Clean and Concentrator, followed by digestion using NEB Nucleoside Digestion Mix at 37° C. overnight. The digested samples were analyzed by LC/MS on an Agilent Triple Quadrupole, and the single nucleotides quantified by MS/MS. The fraction of 5mdC or dC converted was determined based on the relative amounts of 5mdC, dC, dT and dU compared to the untreated substrate.

Activity-Based Screen Using Sequencing Assay with a Methylated Substrate (FIG. 7B).

[0395] Temperature profiles for 5mdC and dC conversion were determined for each stability mutant hit using an NGS assay. For each reaction, 1 μL of enzyme was incubated with 250 nM methylated substrate at 6 different temperatures (30, 35, 40, 45, 50, and 55° C.) overnight. Reactions were stopped by incubation at 95° C. for 5 minutes. Illumina UD Indexes were added by PCR, and the indexed samples pooled and purified using a 1.8×SPRI bead clean-up. The pool was denatured and diluted in Illumina Hyb Buffer 1 to a final concentration of 1 μM. A 30% spike-in of PhiX was added to the library prior to sequencing on an Illumina MiniSeq.

### Summary

[0396] FIGS. 7A and 7B show the results of selected substitution mutations evaluated when present in the scaffold Y130A/Y132H/D133W/R74L/T19Y/C171A (ScE, SEQ ID NO:72). The data is also represented in Table 7.

### Example 4

### Protein Expression and Purification.

[0397] Constructs containing coding regions encoding ACDs with alterations predicted to increase stability were produced. The substitutions mutations were present in a scaffold having Y130A/Y132H/D133W/R74L/T19Y/C171 Å/G108C/G188R/G25K/S45W/I17T/A59P/K60R/Δ6 1-68 (ScK, SEQ ID NO:75). Constructs were transformed in NEB BL21(DE3), grown overnight on LB-kanamycin, at 37° C., and expressed in autoinduction media (terrific broth supplemented with kanamycin and 0.2% lactose) in a 96 deep well plate. Cells were incubated at 37° C. for 6 hours, with shaking, then at 20° C. overnight. The cell pellets were harvested by centrifugation, and then resuspended in BugBuster® Protein Extraction Reagent. The lysates were purified using Dynabeads® Ni-NTA and eluted in 50 mM Tris, 300 mM NaCl, 250 mM imidazole, 5% glycerol and 0.01% tween using a KingFisher (Thermofisher) automated instrument.

### Activity-Based Screen Using a Sequencing Assay.

[0398] Purified libraries were screened for activity using an NGS assay with a methylated ultramer substrate. Reactions containing 1 μL of enzyme and 50 nM methylated substrate were incubated for 1-4 h at 65° C. The stability backbone mutant (ScK) was included as a positive control. Reactions were stopped by incubation at 95° C. for 5 minutes. Two PCR steps for annealing were performed to add adapters followed by Illumina UD Indexes for sequencing.

[0399] Indexed samples were pool and purified using a 1.8×SPRI bead clean-up. The pool was denatured and diluted in Illumina Hyb Buffer 1 to a final concentration of 1 μM. A 30% spike-in of PhiX was added to the library prior to sequencing on an Illumina NextSeq 500.

### SUMMARY

[0400] Table 5 includes the results of other substitution mutations evaluated when present in the scaffold

(ScK. SEO ID NO: 75)
Y130A/Y132H/D133W/R74L/T19Y/C171A/G108C/
G188R/G25K/S45W/117T/A59P/K60R/Δ61-68.

### Example 5

### Protein Expression and Purification.

[0401] Constructs containing coding regions encoding ACDs with alterations predicted to increase stability were produced. Constructs were transformed using BL21(DE3) cells and expressed in terrific broth media. Proteins from cell lysates were purified using nickel affinity chromatography, followed by heparin and size exclusion columns. Final proteins (stored in 20 mM Tris, 200 mM NaCl, 1 mM DTT, 5% glycerol, and 0.01% tween) were concentrated to ˜5 mg/mL and confirmed to be ≥95% pure by SDS-PAGE.

### Tm Measurement (FIG. 8)

[0402] The melting temperature (Tₘ) of the constructs was determined by DSF (differential scanning fluorimetry). Samples were diluted to 1 mg/mL in storage buffer (20 mM Tris, 200 mM NaCl, 1 mM DTT, 5% glycerol and 0.01% tween pH 7.5) and measured in duplicate in a temperature range from 25-100° C. with a heating rate of 1° C./min. Analysis of the minimum of differential curves allowed determination of the Tm. Activity-based stability assay using a sequencing assay (FIG. 9).

[0403] Temperature profiles for 5mdC and dC conversion were determined for each stability mutant hit using an NGS assay. Enzymes were normalized to 200 nM (final reaction concentration) and incubated with 2.5 ng of a library containing 20% unmethylated lambda, 4% M.SssI CpG methylated pUC19, 76% NA12878. The reactions were incubated for 1 hour at 8 different temperatures. Each reaction was prepared in duplicate with appropriate positive controls. Reactions were stopped by incubation at 95° C. for 10 minutes. Illumina UD Indexes were installed onto samples using PCR. Indexed samples were pooled and purified using a 0.9×SPRI bead clean-up. The pool was denatured and diluted in Illumina Hyb Buffer 1 to a final concentration of 1 μM, and the library was sequenced using Illumina NextSeq 500/550.

### Summary

[0404] FIGS. 8 and 9 shows the results of selected alterations (substitution mutations and optional deletions) when present in different scaffolds on stability and fraction of 5mC converted. ScE, SEQ ID NO:72; ScF, SEQ ID NO:74; ScK, SEQ ID NO:75; ScI, SEQ ID NO:77. FIG. 8 also shows the additive effect of stacking mutations. The last three bars show the addition of A126C and addition of Δ104-105, each resulting in an increase of stability.

### Example 6

### Molecular Dynamics-Based Analysis

[0405] Beneficial and/or hindering dynamic couplings for methyl-cytosine deamination were identified as follows. Three replicates of MD simulations were run for different backbones: wild-type, ScK, ScC, ScF, ScK. All simulations had TmCA as ligand and there were no Zn. Each simulation ran for 200 ns with 2 fs time steps. The MD trajectories were preprocessed using MDTraj package in Python. The dynamic couplings were analyzed using Bio3D package in R. Cartesian coordinates were used to calculate dynamic cross correlation (DCC) matrix for each simulation. The DCCs determined which residues had positively/negatively correlated motions. The formula to calculate the DCCs was

$$ii . DCC ( i , j ) = \frac{{〈 Δ {r}_{i} ( t ) \cdot Δ {r}_{j} ( t ) 〉}_{t}}{\sqrt{{〈 {‖ Δ {r}_{i} ( t ) ‖}^{2} 〉}_{t}} \sqrt{{〈 {‖ Δ {r}_{j} ( t ) ‖}^{2} 〉}_{t}}} , \\ iii . Δ {r}_{i} ( t ) = {r}_{i} ( t ) - {〈 {r}_{i} ( t ) 〉}_{t} :$$

[symbol]

means the time ensemble average.

[0406] It was hypothesized that increased DCCs in our selective mutants (main comparison was WT vs. ScF) are linked to improved selectivity, therefore, increasing those couplings to higher degrees would improve the selectivity. The designed mutations are shown in Table 2.

### Example 7

### Analysis to Increase Space in Binding Pocket for Methyl-Cytosine

[0407] Homologous sequences from multiple sequence alignments with insertions were identified. Analysis was limited to insertions that are present in more than X % of sequences; X could be any number. Two different designs where used: 1) X=20 (first set) and 2) X=5 (second set). The most probable signature for insertions in each set was calculated. Sequences with the most probable signatures were designed (Table 3).

### Example 8

### Protein Expression and Purification.

[0408] Constructs containing coding regions encoding ACDs with alterations predicted to increase 5mC selectivity are produced (Table 3 and 4). The substitutions mutations are present in a scaffold having Y130A/Y132H/D133W/R74L/T19Y/C171A/G108C/G188R/G25K/S45W/I17T/A59P/K60R/A6 1-68 (SEQ ID NO:75). Constructs are transformed in NEB BL21(DE3), grown overnight on LB-kanamycin, at 37° C., and expressed in autoinduction media (terrific broth supplemented with kanamycin and 0.2% lactose) in a 96 deep well plate. Cells are incubated at 37° C. for 6 hours, with shaking, then at 20° C. overnight. The cell pellets are harvested by centrifugation, and then resuspended in BugBuster® Protein Extraction Reagent. The lysates are purified using Dynabeads® Ni-NTA and eluted in 50 mM Tris, 300 mM NaCl, 250 mM imidazole, 5% glycerol and 0.01% tween using a KingFisher (Thermofisher) automated instrument.

### Example 9

### Activity-Based Screen Using a Sequencing Assay.

[0409] Purified libraries are screened for activity using an NGS assay with a methylated ultramer substrate. Reactions containing 1 μL of enzyme and 50 nM methylated substrate are incubated for 1-4 h at 65° C. Reactions are stopped by incubation at 95° C. for 5 minutes. Two PCR steps for annealing are performed to add adapters followed by Illumina UD Indexes for sequencing. Indexed samples are pooled and purified using a 1.8×SPRI bead clean-up. The pool is denatured and diluted in Illumina Hyb Buffer 1 to a final concentration of 1 μM. A 30% spike-in of PhiX is added to the library prior to sequencing on an Illumina NextSeq 500.

### Example 10

### Mutant Cytosine Deaminase Dimers

[0410] Examples 10-13 describe the construction and testing of dimers, where the ACD portion of the dimers has the activity of deaminating 5mC at a greater rate than C. It is expected that dimers produced using ACDs having C-preferring activity will have similar characteristics as the dimers produced using 5mC-preferring ACDs but having 5hmC-preferring activity.

[0411] Dimerizing the mutant cytosine deaminase offers stability and speed of reaction, and do not compromise the 5mC selectivity to its monomeric counterpart (see FIG. 10). Deamination activity of several APOBEC variants were assessed using NGS-based deamination activity assay. The enzymes were incubated with 10 nM DNA ultramer of 126 nucleotides containing 17 C and 16 methylated C, in 10 μL reaction with 50 mM BisTris buffer, at 37° C. for various duration as described in Table 12, followed by one minute of heat inactivation at 95° C. The reactions were then subjected to dual-indexed PCR reaction using uracil tolerant Q5U Hot Start High-Fidelity DNA Polymerase (NEB, M0515). The amplified reactions were pooled together, paired-end sequencing run was performed on a NextSeq 500 system. To quantify the deamination activity, the positions of all unmodified or modified C in every sequencing read were assessed, base changes from C to T were assumed to have been deaminated.

[0412] Sequentially introducing mutations into APOBEC, including Y130A/Y132H/D133W on A3A, made the cytidine deaminase highly 5mC selective over unmodified C as shown in the selectivity curves (FIG. 10). The selectivity curves in FIG. 10 also show the evolution towards 5mC selectivity of A3A mutants we have engineered. This alleviates the difficulties caused by sample degradation and offers better mapping quality by preserving DNA sequence complexity. However, the engineered enzyme became undesirably less stable with subsequent introduction of those abovementioned mutations. FIG. 10 and Table 12 also show that our engineered A3A dimer offer stability and speed, and do not have compromised 5mC selectivity to its monomeric counterpart.

TABLE 12
Various conditions for deamination by NEB APOBEC
and various 5mC selective APOBEC mutants

| | | | Buffer pH (50 |
|---|---|---|---|
| | Protein amount | Time | mM Bis Tris) |
| NEB APOBEC | 0.01 or 0.001 μL/ | 30 seconds to | 6.5 |
| | 10 μL reaction | 5 minutes | |
| Y130A | 12 nM or 125 nM | 7.5 to 120 minutes | 6.5 |
| Y130A/Y132H | 12 nM or 125 nM | 7.5 to 120 minutes | 6.5 |
| R74L/Y130A/Y132H/D133W | 74 nM to 2000 nM | 2 to 16 hours | 7.0 |
| R74L/Y130A/Y132H/D133W | 200 nM | 15 minutes to 4 | 7.0 |
| dimer | | hours | |

### Example 11

### Exemplary Design of Dimers

[0413] It was noted from experimental observation, APOBEC A3A can form dimer in solution although majority population of the A3A exist as monomer in solution. The reason monomer is the major population in vitro is not well understood. Therefore, we tested if expressing two A3A deaminases mutants joined by a linker would encourage dimer formation, and tested if the interactions made between the dimer-dimer interface would then afford stability to the engineered A3A.

[0414] FIG. 11 demonstrates one example of an architecture of engineered dimers, where two A3A deaminases are fused together by a flexible 32-amino acids linker, forming either homodimers or heterodimers. In this example, two homodimeric constructs, A3A (Y130A/Y132H/D133W) and A3A (R74L/Y130A/Y132H/D133W) and four heterodimeric constructs consist of A3A (Y130A/Y132H/D133W) and A3A (R74L/Y130A/Y132H/D133W) with catalytically inactive A3A (E72A) mutant on the C and N-terminals, were made by standard molecular methods.

### Example 12

### Deamination Activity of Dimers

[0415] Deamination activity of homodimer and heterodimer altered enzymes were evaluated in NGS-based quantitative deamination assay as described in Example 6, using a DNA ultramer of 126 nucleotides (containing 17 cytosines and 15 5mC interspersed) as substrate. Deamination activity of the enzymes (0.7 μM) were evaluated in NGS-based quantitative deamination assay at various reaction time (0, 15 min, 1 h, 2 h, 4 h) and temperature (25, 37, 42 and 50° C.).

[0416] FIG. 12A shows that all six dimeric constructs have improved activity at higher reaction temperature compared to the monomer. The homodimer of R74L/Y130A/Y132H/D133W exhibits higher activity than the homodimer without R74L at 42° C. The introduction of a stability mutation such as R74L helps the dimer to perform deamination at higher temperatures. Additional stabilization mutations appear to have an additive effect on the stability of the dimer. Thus, homodimerization can be combined with other strategies for stabilization (including stabilizing mutations, stabilizing additives, etc.) in combination to create additive and increased stability. This stabilization effect may be applied to the other mutant APOBEC active site variants that have been engineered for selectivity on 5mC or other cytosine adducts such as 5hmC, etc. While all homodimers show an improvement in activity at higher temperatures, the homodimers with two active sites outperform the other four heterodimers which include a single catalytically active domain in terms of rate of reaction and activity at 42° C. Having the active deaminase at the N-terminus helps in the improvement in activity of the dimer. In addition, it was observed that the heterodimers when having catalytically dead A3A (E72A) at C-terminus were more active than those having a catalytically dead A3A(E72A) at the N-terminus.

[0417] FIG. 12B shows the relationship of C deamination and mC deamination by the A3A (R74L/Y130A/Y132H/D133W) monomer and the six dimers tested at abovementioned temperatures. Data points obtained from the various engineered dimers lie along the same curve as the monomer, indicating that fusing two A3A deaminases together did not impair their preference of deaminating 5mC over unmodified C. When we plotted the deamination data points of the engineered dimers at various temperatures (25° C., 37° C., 42° C. and 50° C.), 42° C. gave the best selectivity (see FIG. 12C). The elevated reaction temperature is favorable for a more unbiased 5mC to T conversion. It was thought that the 5mC is more accessible to the enzyme upon denaturation of DNA secondary structure. Activity at an elevated temperature is a favorable trait offered by the more stable dimer, which is absent in the less stable monomer. This data demonstrates that the dimer exhibited increased conversion and improved selectivity relative to the monomeric ACD.

[0418] One protein dimer includes two deaminase domains. Notably, the same deamination efficiency could not be achieved by simply doubling the amount of monomer to match the number of deaminase domains of the dimer (FIG. 12D). For example, 0.4 μM of the monomer saturated at ˜50% 5mC deamination after 2 hours of reaction at 42° C., while 0.2 μM of dimer deaminate 5mC to more than ˜95% after 15 min at 42° C. This indicates that fusion of the two A3A deaminase domains together provides synergy and increases the enzyme stability and activity. Without wishing to be bound by theory, one model for this synergy is that the dimer binding affinity for the monomer in solution is weak, such that the protein concentration is far below the dissociation constant (KD; unknown) of the dimer favoring a majority monomer population. Doubling of the protein concentration is not sufficient to shift this distribution. Fusion of two monomers into one homodimer enforces a high local protein concentration because the two monomers are now fixed together. In addition, preorganization of adjacent monomers by connection in one polypeptide chain reduces the number of possible conformations/orientations of monomers with respect to each other, reducing conformation entropy and favoring dimerization.

[0419] Next, we subjected the altered A3A (R74L/Y130A/Y132H/D133W) homodimer to further assessment on a mixed DNA substrate (a mix of human DNA (NA 12878) with 100% CpG methylated pUC19 and 0% methylated Lambda DNA). The mixed DNA substrate was sheared to 300 nucleotide fragments and a library was prepared using a ligation-based method. Like the ultramer-based deaminase activity assay, the A3A (R74L/Y130A/Y132H/D133W) homodimer exhibited improved stability at temperatures between 40° C.-50° C., whereas the activity of altered A3A(R74L/Y130A/Y132H/D133W) monomer declined rapidly at temperatures greater than 38° C. (FIG. 13A). The homodimer also outperformed the monomer on a DMSO-denatured DNA library, although its activity at higher temperatures was not as high when compared to NaOH-treated DNA.

[0420] Although zinc is required for A3A deamination activity at higher temperatures, it has been suggested that the ion may also mediate the dimerization and catalytic activity of A3A. However, supplementing 10 μM zinc chloride salt to the reaction of A3A (R74L/Y130A/Y132H/D133W) monomer did not increase the reaction efficiency to the level of the homodimer (FIG. 13A). Thus, it appears that the dimer confers greater stability than what can be achieved by increasing the concentration of zinc.

[0421] The reaction efficiency of the homodimer and monomer A3As was measured with increasing concentrations of DNA. At high concentrations of DNA, the dimer exhibited consistently higher velocity (FIG. 14).

[0422] A highly selective 5mC engineered deaminase prefers to deaminate methylated pUC19 DNA substrate over non-methylated Lambda DNA substrate when both substrates are present in solution. Thus, to test and compare the selectivity of the deaminase, the altered deaminase was incubated with denatured methylated pUC19 and non-methylated Lambda DNA. The monomeric or homodimeric A3A (R74L/Y130A/Y132H/D133W) were incubated with denatured library prepped DNA containing mCpG methylated pUC19 and unmethylated lambda DNA. The library was denatured with 0.02 N NaOH for 10 minutes at 50° C., and or denatured with DMSO for 10 minutes at 95° C.

[0423] To compare how reaction temperatures affect 5mC-selective conversion, 5mC to T conversion level in methylated DNA and C to U conversion level in non-methylated DNA were normalized to 1 by its maximum level (FIG. 13B). In DNA samples denatured with DMSO and NaOH, the monomer had similar reaction profiles on methylated and unmethylated DNA. resulted in differences in the reaction profiles between methylated and unmethylated DNA. Additionally, dimerization resulted in even greater differences between the reaction profiles of methylated and unmethylated DNA. In both the case of Zn added or dimerization, the methylated profile is stabilized at higher temperatures compared to the unmethylated profile. This enables the reaction to be run at higher temperatures where mC to T conversion is high and C to U conversion is low, providing a selectivity advantage under these conditions. In each case, the stability of a given construct and formulation can be quantified by Tmax (FIG. 13C). Here, Tmax (° C.) is defined as the temperature at which the enzyme has the highest level of 5mC or C deamination. Tmax is highest for homodimer in both NaOH and DMSO treated denatured DNA samples. This experiment reflects the stability of the dimer towards chemical denaturants.

[0424] This example demonstrated that connecting two A3A deaminases with a peptide linker remarkably increases the enzyme performance at higher temperature and in the presence of DNA denaturants, presumably by making the protein dimerization more efficient. Dimerization of any A3A deaminases constructs (wild-type or engineered) improves its stability and activity, and this strategy is not limited to just abovementioned engineered A3A deaminases but is applicable to other altered deaminases provided.

### Example 13

### Additional Homodimer/Heterodimer Design

[0425] Additional heterodimers are designed with an inactive N-term monomer (bearing the E72A mutation or other inactivating mutations) connected to an active 5mC-selective altered deaminase as the C-term monomer as shown in Table 10. Additional heterodimers with the inverse configuration, having an inactive C-terminus and an active N-terminus as shown in Table 11 are also designed. The active 5mC-selective altered deaminase can be those disclosed herein, including the altered deaminase (Y130A/Y132H/D133W/R74L/T19Y/C171A/G108C/G188R/G25K/S45W/I17T/A59P/K60R/A6 1-68) as the monomer unit, indicated in the Tables 10-11 as “SEQ ID NO:75”. Other monomer scaffolds are also possible.

### Example 14

### Expression and Purification of Altered Cytidine Deaminases.

[0426] In this example, two altered cytidine deaminase dimers were recombinantly expressed and purified. Gel electrophoresis was used to confirm dimerization of the deaminases.

[0427] Two variants were produced, a first deaminase, referred to herein as the “D133 dimer variant” included the mutations T19Y/R74L/Y130A/Y132H/D133 and a second deaminase, referred to herein as the “D133V dimer variant” included the mutations T19Y/R74L/Y130A/Y132H/D133V, were produced. A nucleic acid construct encoding each variant was transfected into E. co/i and the protein was recombinantly expressed in Terrific broth supplemented with 100 g/ml Kanamycin, 2 mM magnesium sulphate, 0.2% lactose and 0.05% glucose. The polyhistidine tagged protein was purified using Ni-NTA agarose and desalted to storage buffer. The corresponding proteins were expressed in BL21(DE3) cells, purified using Ni-NTA agarose beads, and desalted/concentrated using spin columns to storage buffer (50 mM Tris pH 7.5, 200 mM NaCl, 5% (v/v) glycerol, 0.01% (v/v) Tween-20, 0.5 mM DTT). This yielded mutant protein preparations with 80-85% purity, as judged by SDS-PAGE analysis.

[0428] Each purified protein was run on a denaturing SDS-PAGE gel. From this gel, the molecular weight of the most abundant band for each protein preparation was determined to be approximately 49 kDa (FIG. 15A). The concentration of each variant was determined using the band intensity relative to a standard curve of bovine serum albumin (BSA).

[0429] From this Example, it was determined that each of the D133W and D133W dimer variants expressed well in E. coli.

### Example 15

### Detection of 5mC Using the D133V Dimer Variant.

[0430] The following example was demonstrated using a synthetically produced 101 nucleotide single-stranded DNA oligonucleotide synthesized including 9 unmodified C, 9 5mC and 7 5hmC in various sequence contexts.

[0431] Oligonucleotides were synthesized on controlled pore glass (CPG) solid support with a 12-port MerMade automated DNA synthesizer (Bioautomation Corporation). Bz-dA/Ac-dC/ibu-dG/dT/5-Hydroxymethyl-dC II/Ac-5-Me-dC phosphoramidites were purchased from Glen Research. Reagents for the oligosynthesis were obtained from Tritech: Bio Grade Acetonitrile (AB1124-001), 3% TCA Deblock(DB3990-014), Activator Solution(AB3363-014)., Cap A(CB3970-032) and Cap B(CB3979-032) and Oxidizer(OB9911-032).Oligonucleotides were purified by RPHPLC on Thermo Scientific™ DNAPac™ RP HPLC columns. All solvents used for solubility measurements were of HPLC grade and purchased from Sigma-Aldrich and dried by activated 3 Å molecular sieves or molecular trap packs. Routine concentrations of oligonucleotides analyzed absorbance on NanoDrop S1 spectrophotometer (Thermo Scientific). RNAse-free water was used for all experiments.

[0432] Oligonucleotide Synthesis. Phosphoramidites were coupled on solid universal unylinker support CPG resin 2000A (Chemgenes). Modified phosphoramidites used include 5-Hydroxymethyl-dC II and Ac-5-Me-dC (Glen Research). All modifiers and reagents were used as recommended by manufacturer. Syntheses was performed on 1 μmol scale on Mermade 12 DNA Synthesizer (Bioautomation Corporation) with final DMT off. Upon completion of solid supported synthesis. The CPG was rinsed with 3 mL of 10% diethylamine (DEA) in ACN for 2 minutes, followed by washing with ACN and air drying the CPG. Dried support was transferred to Eppendorf tubes and incubated in 1 mL of 0.4 M NaOH in MeOH/water 4:1 (v/v) at room temperature for 17 hours with rotation for solid support cleavage and nucleobase deprotection. The vial was briefly sonicated to break up the CPG and its supernatant was transferred to a clean vial. The CPG was rinsed with 250 μL of water and combine with the cleaved oligo. The solution was then further dilute to 10 ml-, with 100 mg/mL NaCl in water and loaded onto a prepped Glen-Pak DNA cartridge fitted with a 10 mL syringe. The purification continued beginning with the Salt Wash Step—i.e., the 2 mL, rinse with 100 mg/mL NaCl containing 5% Acetonitrile (ACN) and thereafter followed up with standard protocols. The obtained 2 mL solution was concentrated on low temperature (4C) speed vacuum and purified by RP-HPLC twice. Product fractions were collected and lyophilized overnight to yield the oligonucleotides. Fractions were analyzed on 10% PAGE-Gel prior to analyze purity levels.

[0433] The D133W dimer variant was added to the sample to a final concentration of 100 nM in a total volume of 10 μL, containing 10 nM of DNA substrate in 50 mM BisTris buffer, pH7. The deamination reaction was incubated at 30° C., 32° C., 35° C., 40° C., 45° C., 50° C., 53° C. or 55° C. for 30 or 60 minutes, followed by 1 minute heat inactivation at 95° C.

[0434] The samples were subjected to PCR reaction to add Illumina adapters on both ends of the substrate using uracil tolerant Q5U Hot Start High-Fidelity DNA Polymerase (NEB, M0515). The substrates were further amplified by dual indexed primers that are unique to each sample. The amplified reactions were pooled together for paired-end sequencing on a NextSeq 500 system. FASTQ files were generated for every sample, whereas Python and R were utilized for data analysis and visualization. In order to quantify the deamination activity, the positions of all unmodified or modified C in every sequencing read were assessed, base changes from C to T were assumed to have been deaminated by the D133W dimer variant.

[0435] It was observed that the D133W dimer variant exhibited activity primarily on 5mC, with very low deamination of unmodified C and 5hmC at all temperatures and incubation times (FIG. 15B). The D133W dimer variant exhibited maximal activity on 5mc at approximately 45° C. and had reached maximal reaction efficiency after approximately 30 minutes. (FIG. 15B, 16C). In addition, it was observed that the D133W dimer variant exhibited preferential activity for 5mC over both unmodified C and 5hmC (FIGS. 16A, B, and D).

### Example 16

### Detection of 5mC and 5hmC Using the D133V Dimer Variant.

[0436] The same experiment as described in Example 15 but using the D133V dimer variant rather than the D133W dimer variant. The treated DNA was purified, sequenced, and analyzed as described in Example 15.

[0437] It was observed that the D133V dimer variant exhibited activity on both 5mC and 5hmC, with very low activity on unmodified C. (FIG. 15B). The D133V dimer variant exhibited a slight preference for 5mC (FIG. 15B, FIG. 16D). The D133V dimer variant exhibited maximal activity on both 5mC and 5hmC at approximately 45° C. and had reached maximal reaction efficiency after approximately 30 minutes. (FIG. 15B, 16C). In addition, it was observed that the D133W dimer variant exhibited preferential activity for 5mC over both unmodified C and 5hmC (FIGS. 16A, B, and D). I

### Example 17

Detection of 5hmC by Comparing Results of Sequencing gDNA Treated with a D133W Dimer Variant and Results of Sequencing gDNA Treated with a D133V Dimer Variant.

[0438] The results of Examples 15 and 16 were compared, and it was determined that 5hmC and 5mC could be detected in one sample using the two dimer variants in parallel. DNA samples with unknown methylation profile are treated with D133W and D133V dimer variant separately. Positions with C to T base changes detected in both treatments can be identified as 5mC, whereas cytosine positions that were read as T only in D133V-treated samples but not D133W can be reported as 5hmC. DNA samples with unknown methylation profile are treated with D133W and D133V dimer variant separately. Positions with C to T base changes detected in both treatment could be identified as 5mC, whereas cytosine positions that were read as T only in D133V-treated samples but not D133W could be reported as 5hmC.

[0439] Use of APOBEC3A (T19Y/R74L/Y130A/Y132H/D133V) dimer and APOBEC3A (T19Y/R74L/Y130A/Y132H/D133W) dimer for 5hmC single-base resolution mapping.

[0440] Fully enzymatic, non-destructive 5hmC mapping at single-base resolution with the conservation of the complexity of 4-base genome could be perform by leveraging on the stark difference in the deamination characteristics between D133W variant and D133V variant. The former highly prefers to deaminate 5mC only, while the latter highly prefers to deaminate both 5mC and 5hmC almost equally. In addition, both engineered APOBEC3 Å variants are highly discriminatory against C, which is advantageous as we only need to look at the binary between 5mC and 5hmC.

[0441] To elucidate the status 5hmC in a genomic DNA sample, we will split the sample into two equal portions (FIG. 17). One portion will be treated with D133W variant, which will result in the deamination of 5mC to T. On the other hand, the other portion will be treated with D133V variant, which will result in the deamination of 5mC to T and 5hmC to 5hmU (5hmU is read out as T on the sequencer). We can then perform library prep and assign UMI to each sample to facilitate identification by NGS and bioinformatics analysis.

### Sequence Analysis

[0442] Sequencing reads from D133V variant-treated DNA sample are aligned to reference genome. By quantifying C to T substitution, we the total level of 5mC and 5hmC in the sample is determined.

[0443] The D133W variant-treated samples are analyzed in the same way, whereby only positions containing 5mC will be converted to T.

[0444] By comparing methylation levels from above two treatment groups, both 5mC and 5hmC positions in the DNA sample are detected.

### Example 18

### Methods for Locus-Specific 5mC and 5hmC Detection for In Vitro Diagnostic (IVD)

[0445] The enzymatic deamination of 5mC and 5hmC is broadly applicable to various IVD approaches to profile 5mC and 5hmC status in a locus-specific manner (FIG. 35). While we only provide an example here, the similar principle that uses readout upon hybridization of specifically designed oligonucleotides probes onto defined genomic regions upon APOBEC deamination of modified C to modified U or T can be applicable for IVD.

[0446] One example would be fluorescence in situ hybridization (FISH) for 5mC and 5hmC detection in single cells or tissues. We can readout the epigenetic status (C, 5mC and 5hmC) of defined locus in the genome of fixed cells or tissues by sequentially incubating D133W variant and then D133V variant. The steps are as described:

[0447] Deamination of genome of fixed cells or tissues by incubation of D133W variant. C and 5hmC will not be deaminated but 5mC will convert to T.

[0448] Add fluorescence probes that target both differentially methylated and hydroxymethylated loci. In the example given in FIG. 18, fluorescence probe tagged with a first marker, such as DAPI (blue), anneal to non-deaminated locus of interest, while fluorescence probe tagged with a second marker, such as FAM will anneal to a locus of interest. Excess fluorescence probes are washed away, and the samples imaged.

[0449] Annealed fluorescence probes are then washed away. Deamination of genome of fixed cells or tissues by incubation of D133V variant. C will not be deaminated but 5hmC will convert to 5hmU, read out as T. Step 2 is repeated.

[0450] Epigenetic status of locus of interest can then be deciphered by the sequential readout of the colors. If blue (the first marker) is read out twice at the locus of interest, there is no epigenetic modification. If green (the second marker) is read out twice, the epigenetic modification at the locus of interest is 5mC. If blue is first read out followed by green, the epigenetic modification at the locus of interest is 5hmC.

### Example 19

### Deamination Activities of Altered Cytidine Deaminases on C, 5mC, and 5hmC

[0451] Deamination activity of altered enzymes was evaluated in a NGS-based quantitative deamination assay as described in Example 6, using a DNA oligonucleotide of 101-nucleotides (containing nine cytosine, nine 5mC, and seven 5hmC in various sequence contexts) as substrate (FIG. 19). Enzymes were incubated with the 101-mer substrate and subjected to sequencing. A 5hmC-specific APOBEC will convert all the 5hmC to 5hmU (which is identified as T upon sequencing) and other modified and unmodified cytosines remain as C. By aligning sequencing reads to the known 101-mer substrate DNA sequence, positions with C to T conversion indicate specific 5hmC deamination by altered cytosine deaminases. Deamination activity of the enzymes (0.05 or 0.4 μM) was evaluated in the NGS-based quantitative deamination assay for 30 mins, 1 hour, 2 hours or 4 hours and a temperature of 37 or 42 degrees C.).

[0452] Altered cytidine deaminases were produced by combinatorial mutagenesis at Y130 and D133 positions in APOBEC3 Å in the presence of a Y132H mutation and seven other stability enhancing mutations in the ScF background (R74L, T19Y, C171 Å, G108 Å, G188R, G25K and S45W) (FIG. 20A-1, FIG. 20A-2). Interestingly, although Y130D/D133X mutants showed reduced activity in general, when the y-axis was expanded, Y130D/Y132H mutants with A, G, S, and T amino acids at position 133 show certain preference on deaminating 5hmC over C and 5mC (FIG. 20B).

[0453] A subset of 12 APOBEC Y130D mutants were repurified and tested in combinations with Y132X (where X is H, R, or K) and D133Z (where Z is A, G, S, or T). H, R, and K were selected for substitutions at Y132 as they were previously shown to enhance substrate preference of altered cytidine deaminases for 5mC or C. Here the APOBEC mutants are labelled as 3-letters which represent the amino acids at 130, 132 and 133 positions, respectively. For example, Y130D/Y132H/D133G is abbreviated to DHG. An additional example, Y130D/Y132H/D133S is abbreviated to DHS. Other than DHG, DHS and DRA mutants that failed to express (FIG. 21A) using automated KingFisher instrument, all the other mutants deaminated more 5hmC than C and 5mC combined (FIG. 21). In contrast, our engineered 5mC-selective ScF APOBEC mutant had minimal 5hmC deamination activity (FIG. 21C).

[0454] Five purer protein preparations were obtained by Ni-NTA-purification and desalting (FIG. 22A) to repeat and confirm the 5hmC preferring activities. The five proteins were the ones described in FIG. 21 having the DHA, DHT, DKS, DKT, or DRS substitution mutations at 130/132/133). For this experiment, Y130A/Y132H/D133V (AHV) was included as an altered cytidine deaminase that could deaminate both 5mC and 5hmC almost equally. Also included were various experimental conditions that allowed us to draw the selectivity curves for respective proteins (FIG. 22B). To recall, detection of 5hmC by using AHV required simultaneous treatment of DNA sample with AHW follow by subtractive analysis; however, this will not be necessary by using a 5hmC-specific cytidine deaminase. The mutants achieved ˜75% of 5hmC conversion while 5mC and C are only ˜25% converted, after incubation for 4 hours at 37 degrees C. or 42 degrees C., in the presence of 5-fold excess ZnCl₂ (FIG. 22C-D).

[0455] The complete disclosure of all patents, patent applications, and publications, and electronically available material (including, for instance, nucleotide sequence submissions in, e.g., GenBank and RefSeq, and amino acid sequence submissions in, e.g., SwissProt, PIR, PRF, PDB, and translations from annotated coding regions in GenBank and RefSeq) cited herein are incorporated by reference in their entirety. Supplementary materials referenced in publications (such as supplementary tables, supplementary figures, supplementary materials and methods, and/or supplementary experimental data) are likewise incorporated by reference in their entirety. In the event that any inconsistency exists between the disclosure of the present application and the disclosure(s) of any document incorporated herein by reference, the disclosure of the present application shall govern. The foregoing detailed description and examples have been given for clarity of understanding only. No unnecessary limitations are to be understood therefrom. The disclosure is not limited to the exact details shown and described, for variations obvious to one skilled in the art will be included within the disclosure defined by the claims.

[0456] Unless otherwise indicated, all numbers expressing quantities of components, molecular weights, and so forth used in the specification and claims are to be understood as being modified in all instances by the term “about.” Accordingly, unless otherwise indicated to the contrary, the numerical parameters set forth in the specification and claims are approximations that may vary depending upon the desired properties sought to be obtained by the present disclosure. At the very least, and not as an attempt to limit the doctrine of equivalents to the scope of the claims, each numerical parameter should at least be construed in light of the number of reported significant digits and by applying ordinary rounding techniques.

[0457] Notwithstanding that the numerical ranges and parameters setting forth the broad scope of the disclosure are approximations, the numerical values set forth in the specific examples are reported as precisely as possible. All numerical values, however, inherently contain a range necessarily resulting from the standard deviation found in their respective testing measurements.

[0458] All headings are for the convenience of the reader and should not be used to limit the meaning of the text that follows the heading, unless so specified.

1. An altered cytidine deaminase (ACD) having 5hmC-preferring deaminase activity, wherein conversion of 5-hydroxymethyl cytosine (5hmC) to 5-hydroxymethyl uracil (5hmU) by deamination occurs at a greater rate than conversion of 5-methyl cytosine (5mC) to thymidine (T) and cytosine (C) to uracil (U), wherein the ACD is APOBEC3A (SEQ ID NO:3) and wherein the ACD comprises one or more substitution mutations, deletions, or insertions that confer 5hmC-preferring deaminase activity.

2. (canceled)

3. The ACD of claim 1, wherein 5hmC-preferring deaminase comprises:
(a) a substitution mutation at position functionally equivalent to Y130 in a wild-type ACD, wherein the substitution is D;
(b) a substitution mutation at position functionally equivalent to Y132 in a wild-type ACD, wherein the substitution is H, R, or K;
(c) a substitution mutation at a position functionally equivalent to D133 in a wild-type ACD, wherein the substitution is A, G, S, or T;
or
(d) a combination of (a) and (c) or a combination of (a), (b), and (c).

4. The ACD of claim 1, wherein the ACD comprises SEQ ID NO:139 or a sequence having at least 75% or more sequence identity to SEQ ID NO:139, preferably at least 90%.

5. The ACD of claim 1, comprising one or more alterations that enhance the stability of the ACD, wherein the one or more stability-enhancing alterations are selected from substitution mutations at a position functionally equivalent to Al 12X, A126X, A139X, A148X, A185X, A192X, A59X, A87X, C106X, C161X, C171X, C34X, D145X, D156X, D163X, D167X, D177X, D180X, D41X, D77X, D85X, E109X, E116X, E138X, E157X, E38X, G105X, G108X, G188X, G25X, G27X, H119X, H11X, H16X, H182X, H29X, H51LX, I17X, I26X, I89X, K47X, K60X, L135X, L62X, L78X, M14X, M48X, N117X, N196X, N21X, N42X, P80X, Q115X, Q141X, Q169X, Q184X, R111X, R123X, R189X, R39X, R74X, R91X, S103X, S183X, S187X, S20X, S45X, T118X, T164X, T19X, T31X, T93X, V110X, V79X, L12X, D14X, T19X, G27X, R28X, E38X, F54X, H56X, N57X, Y67X, L73X, D77X, S81X, Y90X, I96X, S97X, C101X, F102X, W104X, C106X, A107X, L114X, V120X, L122X, R128X, Y136X, M142X, A146X, K159X, C161X, L186X, a deletion selected from ΔM1-L12, ΔE36-G53, ΔN61-G68, ΔW104-G105, ΔQ195-N199, or ΔI26-G27, and combinations thereof, wherein the position number designation is functionally equivalent to the position in a wild-type APOBEC3A (SEQ ID NO:3), and X is an amino acid substitution different from the wild-type amino acid at that position.

6. The ACD of claim 5, wherein the one or more stability-enhancing alterations are selected from substitution mutations at a position functionally equivalent to a mutation identified as stabilizing in Table 5 and/or a deletion from Table 6, optionally wherein the ACD comprises one or more ancillary substitution mutations.

7. (canceled)

8. (canceled)

9. (canceled)

10. The ACD of claim 1, wherein the deletion and one or more ancillary substitution mutations of the ACD is ΔN61-G68/A59P/K60R, ΔN61-G68/A59L/R69Y, ΔN61-G68/A59L/K60E/R69N, ΔN61-G68/A59P/K60E/R69H, ΔN61-G68/A59P/K60Q/R69H, ΔN61-G68/A59L/R69N, ΔN61-G68/R69D, ΔN61-G68/A59L/K60R, ΔN61-G68/A59P/K60G/R69L, AW104-G105/F102R, ΔW104-G105/S103N, ΔW104-G105/F102R/S103N, ΔW104-G105/Δ1-12, ΔW104-G105/Δ1-12/F102R, ΔW104-G105/Δ1-12/S103N or ΔW104-G105/Δ1-12/F102R/S103N.

11. The ACD of claim 1, wherein the ACD comprises a combination of stability-enhancing alterations selected from Table 7 or 8.

12. The ACD of claim 5, wherein the ACD comprises:
a. three or more stability-enhancing alterations,
b. four or more stability-enhancing alterations,
c. five or more stability-enhancing alterations,
d. six or more stability-enhancing alterations,
e. seven or more stability-enhancing alterations,
f. eight or more stability-enhancing alterations,
g. nine or more stability-enhancing alterations,
h. ten or more stability-enhancing alterations,
i. eleven or more stability-enhancing alterations,
k. twelve or more stability-enhancing alterations,
l. thirteen or more stability-enhancing alterations, or
m. fourteen or more stability-enhancing alterations.

13. (canceled)

14. The ACD of claim 1, comprising one or more alterations that enhance the stability of an ACD for 5hmC, comprising one or more stability-enhancing alterations selected from I17T, T19Y, G25K, S45W, A59P, K60R, deletion of 61-68, R74L, deletion of W104, deletion of G105, G108C, A126C, C171A, G188R, or a combination thereof.

15. The ACD of claim 1, comprising one or more alterations that enhance the stability of an ACD for 5hmC, comprising stability-enhancing alterations:
I17T, T19Y, G25K, S45W, A59P, K60R, deletion of 61-68, R74L, deletion of W104, deletion of G105, G108C, C171A, and G188R or
I17T, T19Y, G25K, S45W, A59P, K60R, deletion of 61-68, R74L, G108C, C171A, and G188R:
or
I17T, T19Y, G25K, S45W, A59P, K60R, deletion of 61-68, R74L, deletion of G105, G108C, C171A, and G188R.

16. (canceled)

17. (canceled)

18. (canceled)

19. (canceled)

20. (canceled)

21. A dimerized altered cytidine deaminase (dACD) comprising a first cytidine deaminase comprising the ACD of claim 1 and a second cytidine deaminase.

22. A polynucleotide encoding the ACD of claim 1.

23. A composition comprising the ACD of claim 1 and a buffer.

24. The composition of claim 23, wherein the composition further comprises a sample comprising DNA comprising at least one modified cytosine, wherein the modified cytosine is 5-methyl cytosine (5mC), 5-hydroxymethyl cytosine (5hmC), 5-formyl cytosine (5fC), 5-carboxy cytosine (5caC), or a combination thereof, wherein the DNA comprises single-stranded DNA, genomic DNA, or cell free DNA.

25. (canceled)

26. (canceled)

27. (canceled)

28. A method comprising:
providing a sample of DNA suspected of comprising single-stranded DNA comprising at least one 5-hydroxymethyl cytosine (5hmC);
contacting the single-stranded DNA with an ACD under conditions suitable for conversion of 5hmC to 5hmU at a greater rate than conversion of 5-methylcytosine (5mC) to thymidine (T) and cytosine (C) to uracil (U) by deamination, to result in converted single-stranded DNA, wherein the ACD is the ACD of claim 1, 2, 3r; and
processing the converted single-stranded DNA to produce a sequencing library.

29. (canceled)

30. A method comprising:
providing a sample of DNA suspected of comprising double-stranded DNA comprising at least one 5-hydroxymethyl cytosine (5hmC);
processing the double-stranded DNA to produce a sequencing library;
denaturing the sequencing library to result in a single-stranded DNA;
contacting the single-stranded DNA with an ACD under conditions suitable for conversion of 5hmC to 5hmU at a greater rate than conversion of 5-methylcytosine (5mC) to thymidine (T) and cytosine (C) to uracil (U) by deamination, to result in converted single-stranded DNA,
wherein the altered cytidine deaminase is the ACD of claim 1; and
converting the converted single-stranded DNA to a converted double-stranded DNA sequencing library.

31. The method of claim 30, wherein the processing comprises fragmentation or tagmentation of the double-stranded DNA and addition of a universal sequence to the double-stranded DNA fragments, optionally wherein the universal sequence is part of an adapter added to the double-stranded DNA fragments.

32. (canceled)

33. The method of claim 30, wherein the converting comprises amplifying the converted single-stranded DNA to be the converted double-stranded DNA.

34. The method of claim 28, wherein the sample is a biological sample, such as cell-free DNA, blood, serum, single cells, isolated nuclei, or a tissue, such as a tumor tissue.

35. (canceled)

36. (canceled)

37. (canceled)

38. (canceled)

39. (canceled)

40. The method of claim 28, further comprising:
providing a surface comprising a plurality of amplification sites, wherein the amplification sites comprise at least two populations of attached single-stranded capture oligonucleotides having a free 3′ end, and
contacting the surface comprising amplification sites with the sequencing library under conditions suitable to produce a plurality of amplification sites that each comprise a clonal population of amplicons from an individual member of the sequencing library.

41. (canceled)

The application's sequence listing, which the Patent Office published only in electronic form, follows.

SEQUENCE LISTING (1241 sequences)

SEQ ID NO: 1 - protein, 198 aa, Homo sapiens [sequence omitted]

SEQ ID NO: 2 - protein, 236 aa, Homo sapiens
MTSEKGPSTGDPTLRRRIEPWEFDVFYDPRELRKEACLLYEIKWGMSRKIWRSSGKNTTNHVEVNFIKKFTSERDFHPSMSCSITWFLSWSPCWECSQAIREFLSRHPGVTLVIYVARLFWHMDQQNRQGLRDLVNSGVTIQIMRASEYYHCWRNFVNYPPGDEAHWPQYPPLWMMLYALELHCIILSLPPCLKISRRWQNHLTFFRLHLQNCHYQTIPPHILLATGLIHPSVAWR

SEQ ID NO: 3 - protein, 199 aa, Homo sapiens
MEASPASGPRHLMDPHIFTSNFNNGIGRHKTYLCYEVERLDNGTSVKMDQHRGFLHNQAKNLLCGFYGRHAELRFLDLVPSLQLDPAQIYRVTWFISWSPCFSWGCAGEVRAFLQENTHVRLRIFAARIYDYDPLYKEALQMLRDAGAQVSIMTYDEFKHCWDTFVDHQGCPFQPWDGLDEHSQALSGRLRAILQNQGN

SEQ ID NO: 4 - protein, 224 aa, Homo sapiens
MAQKEEAAVATEAASQNGEDLENLDDPEKLKELIELPPFEIVTGERLPANFFKFQFRNVEYSSGRNKTFLCYVVEAQGKGGQVQASRGYLEDEHAAAHAEEAFFNTILPAFDPALRYNVTWYVSSSPCAACADRIIKTLSKTKNLRLLILVGRLFMWEEPEIQAALKKLKEAGCKLRIMKPQDFEYVWQNFVEQEEGESKAFQPWEDIQENFLYYEEKLADILK

SEQ ID NO: 5 - protein, 382 aa, Homo sapiens
MNPQIRNPMERMYRDTFYDNFENEPILYGRSYTWLCYEVKIKRGRSNLLWDTGVFRGQVYFKPQYHAEMCFLSWFCGNQLPAYKCFQITWFVSWTPCPDCVAKLAEFLSEHPNVTLTISAARLYYYWERDYRRALCRLSQAGARVTIMDYEEFAYCWENFVYNEGQQFMPWYKFDENYAFLHRTLKEILRYLMDPDTFTFNFNNDPLVLRRRQTYLCYEVERLDNGTWVLMDQHMGFLCNEAKNLLCGFYGRHAELRFLDLVPSLQLDPAQIYRVTWFISWSPCFSWGCAGEVRAFLQENTHVRLRIFAARIYDYDPLYKEALQMLRDAGAQVSIMTYDEFEYCWDTFVYRQGCPFQPWDGLEEHSQALSGRLRAILQNQGN

SEQ ID NO: 6 - protein, 190 aa, Homo sapiens
MNPQIRNPMKAMYPGTFYFQFKNLWEANDRNETWLCFTVEGIKRRSVVSWKTGVFRNQVDSETHCHAERCFLSWFCDDILSPNTKYQVTWYTSWSPCPDCAGEVAEFLARHSNVNLTIFTARLYYFQYPCYQEGLRSLSQEGVAVEIMDYEDFKYCWENFVYNDNEPFKPWKGLKTNFRLLKRRLRESLQ

SEQ ID NO: 7 - protein, 386 aa, Homo sapiens
MNPQIRNPMERMYRDTFYDNFENEPILYGRSYTWLCYEVKIKRGRSNLLWDTGVFRGPVLPKRQSNHRQEVYFRFENHAEMCFLSWFCGNRLPANRRFQITWFVSWNPCLPCVVKVTKFLAEHPNVTLTISAARLYYYRDRDWRWVLLRLHKAGARVKIMDYEDFAYCWENFVCNEGQPFMPWYKFDDNYASLHRTLKEILRNPMEAMYPHIFYFHFKNLLKACGRNESWLCFTMEVTKHHSAVFRKRGVFRNQVDPETHCHAERCFLSWFCDDILSPNTNYEVTWYTSWSPCPECAGEVAEFLARHSNVNLTIFTARLCYFWDTDYQEGLCSLSQEGASVKIMGYKDFVSCWKNFVYSDDEPFKPWKGLQTNFRLLKRRLREILQ

SEQ ID NO: 8 - protein, 373 aa, Homo sapiens
MKPHFRNTVERMYRDTFSYNFYNRPILSRRNTVWLCYEVKTKGPSRPRLDAKIFRGQVYSQPEHHAEMCFLSWFCGNQLPAYKCFQITWFVSWTPCPDCVAKLAEFLAEHPNVTLTISAARLYYYWERDYRRALCRLSQAGARVKIMDDEEFAYCWENFVYSEGQPFMPWYKFDDNYAFLHRTLKEILRNPMEAMYPHIFYFHFKNLRKAYGRNESWLCFTMEVVKHHSPVSWKRGVFRNQVDPETHCHAERCFLSWFCDDILSPNTNYEVTWYTSWSPCPECAGEVAEFLARHSNVNLTIFTARLYYFWDTDYQEGLRSLSQEGASVEIMGYKDFKYCWENFVYNDDEPFKPWKGLKYNFLFLDSKLQEILE

SEQ ID NO: 9 - protein, 384 aa, Homo sapiens
MKPHFRNTVERMYRDTFSYNFYNRPILSRRNTVWLCYEVKTKGPSRPPLDAKIFRGQVYSELKYHPEMRFFHWFSKWRKLHRDQEYEVTWYISWSPCTKCTRDMATFLAEDPKVTLTIFVARLYYFWDPDYQEALRSLCQKRDGPRATMKIMNYDEFQHCWSKFVYSQRELFEPWNNLPKYYILLHIMLGEILRHSMDPPTFTFNFNNEPWVRGRHETYLCYEVERMHNDTWVLLNQRRGFLCNQAPHKHGFLEGRHAELCFLDVIPFWKLDLDQDYRVTCFTSWSPCFSCAQEMAKFISKNKHVSLCIFTARIYDDQGRCQEGLRTLAEAGAKISIMTYSEFKHCWDTFVDHQGCPFQPWDGLDEHSQDLSGRLRAILQNQEN

SEQ ID NO: 10 - protein, 200 aa, Homo sapiens
MALLTAETFRLQFNNKRRLRRPYYPRKALLCYQLTPQNGSTPTRGYFENKKKCHAEICFINEIKSMGLDETQCYQVTCYLTWSPCSSCAWELVDFIKAHDHLNLGIFASRLYYHWCKPQQKGLRLLCGSQVPVEVMGFPEFADCWENFVDHEKPLSFNPYKMLEELDKNSRAIKRRLERIKIPGVRAQGRYMDILCDAEV

SEQ ID NO: 11 - protein, 367 aa, Homo sapiens
MEPIYEEYLANHGTIVKPYYWLSFSLDCSNCPYHIRTGEEARVSLTEFCQIFGFPYGTTFPQTKHLTFYELKTSSGSLVQKGHASSCTGNYIHPESMLFEMNGYLDSAIYNNDSIRHIILYSNNSPCNEANHCCISKMYNFLITYPGITLSIYFSQLYHTEMDFPASAWNREALRSLASLWPRVVLSPISGGIWHSVLHSFISGVSGSHVFQPILTGRALADRHNAYEINAITGVKPYFTDVLLQTKRNPNTKAQEALESYPLNNAFPGQFFQMPSGQLQPNLPPDLRAPVVFVLVPLRDLPPMHMGQNPNKPRNIVRHLNMPQMSFQETKDLGRLPTGRSVEIVEITEQFASSKEADEKKKKKGKK

SEQ ID NO: 12 - protein, 38 aa, synthetic construct
  VARIANT 2: note = P, A, or V
  VARIANT 4..31: note = X can be any amino acid.
  VARIANT 34..37: note = X can be any amino acid
  VARIANT 4..31: note = This region can encompass 23-28 residues
  VARIANT 34..37: note = This region can encompass 2-4 residues
HXEXXXXXXXXXXXXXXXXXXXXXXXXXXXXPCXXXXC

SEQ ID NO: 13 - protein, 87 aa, synthetic construct
  VARIANT 2: note = X can be any amino acid
  VARIANT 4..27: note = X can be any amino acid
  VARIANT 30: note = S or T
  VARIANT 45..52: note = X can be any amino acid
  VARIANT 33..36: note = X can be any amino acid
  VARIANT 54..58: note = X can be any amino acid
  VARIANT 60: note = L or I
  VARIANT 62..72: note = X can be any amino acid
  VARIANT 74..75: note = X can be any amino acid
  VARIANT 77..86: note = X can be any amino acid
  VARIANT 38..43: note = X can be any amino acid
  VARIANT 33..36: note = This region can encompass 2-4 residues
  VARIANT 62..72: note = This region can encompass 8-11 residues
HXEXXXXXXXXXXXXXXXXXXXXXXXXSWXPCXXXXCXXXXXXFXXXXXXXXLXXXXXRXYXXXXXXXXXXXLXXLXXXXXXXXXXM

SEQ ID NO: 14 - protein, 199 aa, synthetic construct
  VARIANT 1..26: note = X can be any amino acid
  VARIANT 29..30: note = X can be any amino acid
  VARIANT 32: note = X can be any amino acid
  VARIANT 36: note = X can be any amino acid
  VARIANT 38..52: note = X can be any amino acid
  VARIANT 54..56: note = X can be any amino acid
  VARIANT 58..69: note = X can be any amino acid
  VARIANT 73..74: note = X can be any amino acid
  VARIANT 76..89: note = X can be any amino acid
  VARIANT 91..92: note = X can be any amino acid
  VARIANT 95..96: note = X can be any amino acid
  VARIANT 102..105: note = X can be any amino acid
  VARIANT 108..112: note = X can be any amino acid
  VARIANT 115..121: note = X can be any amino acid
  VARIANT 123: note = X can be any amino acid
  VARIANT 125..127: note = X can be any amino acid
  VARIANT 129: note = L or I
  VARIANT 141..142: note = X can be any amino acid
  VARIANT 131..138: note = X can be any amino acid
  VARIANT 144..146: note = X can be any amino acid
  VARIANT 148..152: note = X can be any amino acid
  VARIANT 154..157: note = X can be any amino acid
  VARIANT 159..160: note = X can be any amino acid
  VARIANT 163..164: note = X can be any amino acid
  VARIANT 167..172: note = X can be any amino acid
  VARIANT 174: note = X can be any amino acid
  VARIANT 177..189: note = X can be any amino acid
  VARIANT 191..192: note = X can be any amino acid
  VARIANT 194..199: note = X can be any amino acid
  VARIANT 1..26: note = This region can encompass 16-26 residues
  VARIANT 102..105: note = This region can encompass 2-4 residues
  VARIANT 194..199: note = This region can encompass 2-6 residues
XXXXXXXXXXXXXXXXXXXXXXXXXXGRXXTXLCYXVXXXXXXXXXXXXXXXGXXXNXXXXXXXXXXXXHAEXXFXXXXXXXXXXXXXXYXXTWXXSWSPCXXXXCAXXXXXFLXXXXXXXLXIXXXRXYXXXXXXXXGLXXLXXXGXXXXXMXXXXFXXCWXXFVXXXXXXFXPWXXXXXXXXXXXXXLXXIXXXXXX

SEQ ID NO: 15 - protein, 199 aa, synthetic construct
  VARIANT 1..26: note = X can be any amino acid
  VARIANT 29..30: note = X can be any amino acid
  VARIANT 32: note = X can be any amino acid
  VARIANT 36: note = X can be any amino acid
  VARIANT 38..52: note = X can be any amino acid
  VARIANT 54..69: note = X can be any amino acid
  VARIANT 73..74: note = X can be any amino acid
  VARIANT 76..89: note = X can be any amino acid
  VARIANT 91..92: note = X can be any amino acid
  VARIANT 95..96: note = X can be any amino acid
  VARIANT 102..105: note = X can be any amino acid
  VARIANT 108..112: note = X can be any amino acid
  VARIANT 115..121: note = X can be any amino acid
  VARIANT 123: note = X can be any amino acid
  VARIANT 126..127: note = X can be any amino acid
  VARIANT 129: note = L or I
  VARIANT 131..138: note = X can be any amino acid
  VARIANT 141..142: note = X can be any amino acid
  VARIANT 144..146: note = X can be any amino acid
  VARIANT 148..152: note = X can be any amino acid
  VARIANT 154..157: note = X can be any amino acid
  VARIANT 159..160: note = X can be any amino acid
  VARIANT 163..164: note = X can be any amino acid
  VARIANT 167..172: note = X can be any amino acid
  VARIANT 174: note = X can be any amino acid
  VARIANT 177..189: note = X can be any amino acid
  VARIANT 194..199: note = X can be any amino acid
  VARIANT 191..192: note = X can be any amino acid
XXXXXXXXXXXXXXXXXXXXXXXXXXGRXXTXLCYXVXXXXXXXXXXXXXXXGXXXXXXXXXXXXXXXXHAEXXFXXXXXXXXXXXXXXYXXTWXXSWSPCXXXXCAXXXXXFLXXXXXXXLXIFXXRXYXXXXXXXXGLXXLXXXGXXXXXMXXXXFXXCWXXFVXXXXXXFXPWXXXXXXXXXXXXXLXXIXXXXXX

SEQ ID NO: 16 - protein, 199 aa, synthetic construct
MEASPASGPRHLMDPHIFTSNFNNGIGRHKTYLCYEVERLDNGTSVKMDQHRGFLHNQAKNLLCGFYGRHAELRFLDLVPSLQLDPAQIYRVTWFISWSPCFSWGCAGEVRAFLQENTHVRLRIFAARIADYDPLYKEALQMLRDAGAQVSIMTYDEFKHCWDTFVDHQGCPFQPWDGLDEHSQALSGRLRAILQNQGN

SEQ ID NO: 17 - protein, 199 aa, synthetic construct
MEASPASGPRHLMDPHIFTSNFNNGIGRHKTYLCYEVERLDNGTSVKMDQHRGFLHNQAKNLLCGFYGRHAELRFLDLVPSLQLDPAQIYRVTWFISWSPCFSWGCAGEVRAFLQENTHVRLRIFAARIADHDPLYKEALQMLRDAGAQVSIMTYDEFKHCWDTFVDHQGCPFQPWDGLDEHSQALSGRLRAILQNQGN

SEQ ID NO: 18 - protein, 199 aa, synthetic construct
MEASPASGPRHLMDPHIFTSNFNNGIGRHKTYLCYEVERLDNGTSVKMDQHRGFLHNQAKNLLCGFYGRHAELRFLDLVPSLQLDPAQIYRVTWFISWSPCFSWGCAGEVRAFLQENTHVRLRIFAARILDYDPLYKEALQMLRDAGAQVSIMTYDEFKHCWDTFVDHQGCPFQPWDGLDEHSQALSGRLRAILQNQGN

SEQ ID NO: 19 - protein, 202 aa, Macaca fascicularis
MDGSPASRPRHLMDPNTFTFNFNNDLSVRGRHQTYLCYEVERLDNGTWVPMDERRGFLHNKAKNVPCGDYGCHVELRFLCEVPSWQLDPAQTYRVTWFISWSPCFRKGCAGQVRAFLQENKHVRLRIFAARIYDYDPRYQEALRTLRDAGAQVSIMTYEEFKHCWDTFVDRQGRPFQPWDGLDEHSQALSGRLRAILQNQGN

SEQ ID NO: 20 - protein, 199 aa, Pongo pygmaeus
MEASPASGPRHLMDPCVFTSNFNNGIRWHKTYLCYEVERLDNGTWVKMDQHRGFLHNQARNPLYGLDGRHAELRFLGLLPYWQLDPAQIYRVTWFISWSPCFSWGCARQVRAFLQENTHVRLRIFAARIYDYDPLYKEALQMLRDAGAQVSIMTYDEFEYCWNTFVDHQGCPFQPWDGLEEHSQALSGKLQAILLNQGN

SEQ ID NO: 21 - protein, 199 aa, Nomascus leucogenys
MEASPASRPGHLMDPQVFTSNFNNGIRWHKTYLCYEVERLDNGTWVKMDQHRGFLHNQAKNLFCGFYGRHAELCFLDLVPSLQLDPAQTYRVTWFISWSPCFSWGCAEQVRAFLQENTHVRLRLFAARIYDYDPLYKEALQMLRGAGAQVSIMTYHEFKHCWDTFVDHQGRPFQPWDGLEEHSQALSGRLQAILQNQGN

SEQ ID NO: 22 - protein, 199 aa, Pan troglodytes
TEASPASGPRHLMDPHIFTSNFNNGIGRRKTYLCYEVERLDNGTSVKMDQHRGFLHNQAKNLLCGFYGRHAELCFLDLVPSLQLDPAQIYRVTWFISWSPCFSWGCAGQVRAFLQENTHVRLRIFAARIYDYDPLYKEALQMLRDAGAQVSIMTYDEFKHCWDTFVDHQGCPFQPWDGLEEHSQALSGRLRAILQNQGN

SEQ ID NO: 23 - protein, 199 aa, Gorilla gorilla
VEASPASGPRHLMDPHIFTSNFNNVIGRHKTYLCYEVERLDNGTWVKMDQHRGFLHNQAKNLLCGFYGRHAELRFLDLVPSLQLDPAQIYRVTWFISWSPCFSWGCAGQVRAFLQENTHVRLHIFAARIYDYDPLYKEALQMLRDAGAQVSIMTYDEFKHCWDTFVDHQGCPFQPWDGLEEHSQALSGRLRAILQNQGN

SEQ ID NO: 24 - DNA, 48 bp, synthetic construct
  source 1..48: mol_type = other DNA
  modified_base 7: mod_base = m5c
  modified_base 12: mod_base = OTHER; note = 5-hydroxymethylcytosine
  modified_base 18: mod_base = m5c
  modified_base 33: mod_base = OTHER; note = 5-hydroxymethylcytosine
  modified_base 41: mod_base = m5c
  modified_base 48: mod_base = OTHER; note = 5-hydroxymethylcytosine
aaggtccgtcacgcagacgacggacagcgagaccactgaccgatcaac

SEQ ID NO: 25 - DNA, 48 bp, synthetic construct
  source 1..48: mol_type = other DNA
  modified_base 6: mod_base = OTHER; note = deoxyuracil
  modified_base 10: mod_base = OTHER; note = deoxyuracil
  modified_base 12: mod_base = OTHER; note = Hydroxymethyldeoxyuridine
  modified_base 14: mod_base = OTHER; note = deoxyuracil
  modified_base 21: mod_base = OTHER; note = deoxyuracil
  modified_base 25: mod_base = OTHER; note = deoxyuracil
  modified_base 28: mod_base = OTHER; note = deoxyuracil
  modified_base 33: mod_base = OTHER; note = Hydroxymethyldeoxyuridine
  modified_base 34: mod_base = OTHER; note = deoxyracil
  modified_base 36: mod_base = OTHER; note = deoxyuracil
  modified_base 40: mod_base = OTHER; note = deoxyuracil
  modified_base 45: mod_base = OTHER; note = deoxyuracil
  modified_base 48: mod_base = OTHER; note = Hydroxymethyldeoxyuridine
aaggtttgttatgtagatgatggatagtgagattattgattgattaat

SEQ ID NO: 26 - DNA, 48 bp, synthetic construct
  source 1..48: mol_type = other DNA
  modified_base 12: mod_base = OTHER; note = 5-hydroxymethylcytosine
  modified_base 33: mod_base = OTHER; note = 5-hydroxymethylcytosine
  modified_base 45: mod_base = OTHER; note = 5-hydroxymethylcytosine
aaggtctgtcacgcagatgacggacagcgagaccactgactgatcaac

SEQ ID NO: 27 - DNA, 48 bp, synthetic construct
  source 1..48: mol_type = other DNA
  modified_base 6: mod_base = OTHER; note = deoxyuracil
  modified_base 7: mod_base = m5c
  modified_base 18: mod_base = m5c
  modified_base 41: mod_base = m5c
  modified_base 14: mod_base = OTHER; note = deoxyuracil
  modified_base 10: mod_base = OTHER; note = deoxyuracil
  modified_base 21: mod_base = OTHER; note = deoxyuracil
  modified_base 25: mod_base = OTHER; note = deoxyuracil
  modified_base 28: mod_base = OTHER; note = deoxyuracil
  modified_base 34: mod_base = OTHER; note = deoxyuracil
  modified_base 36: mod_base = OTHER; note = deoxyuracil
  modified_base 40: mod_base = OTHER; note = deoxyuracil
  modified_base 45: mod_base = OTHER; note = deoxyuracil
  modified_base 12: mod_base = OTHER; note = 5-hydroxymethylcytosine
  modified_base 33: mod_base = OTHER; note = 5-hydroxymethylcytosine
  modified_base 48: mod_base = OTHER; note = 5-hydroxymethylcytosine
aaggttcgttacgtagacgatggatagtgagactattgatcgattaac

SEQ ID NO: 28 - DNA, 48 bp, synthetic construct
  source 1..48: mol_type = other DNA
  modified_base 6: mod_base = OTHER; note = deoxyuracil
  modified_base 10: mod_base = OTHER; note = deoxyuracil
  modified_base 14: mod_base = OTHER; note = deoxyuracil
  modified_base 21: mod_base = OTHER; note = deoxyuracil
  modified_base 25: mod_base = OTHER; note = deoxyuracil
  modified_base 28: mod_base = OTHER; note = deoxyuracil
  modified_base 34: mod_base = OTHER; note = deoxyuracil
  modified_base 36: mod_base = OTHER; note = deoxyuracil
  modified_base 40: mod_base = OTHER; note = deoxyuracil
  modified_base 45: mod_base = OTHER; note = deoxyuracil
  modified_base 12: mod_base = OTHER; note = 5-hydroxymethylcytosine
  modified_base 33: mod_base = OTHER; note = 5-hydroxymethylcytosine
  modified_base 48: mod_base = OTHER; note = 5-hydroxymethylcytosine
aaggtttgttacgtagatgatggatagtgagactattgattgattaac

SEQ ID NO: 29 - DNA, 48 bp, synthetic construct
  source 1..48: mol_type = other DNA
  modified_base 12: mod_base = OTHER; note = Hydroxymethyldeoxyuridine
  modified_base 33: mod_base = OTHER; note = Hydroxymethyldeoxyuridine
  modified_base 48: mod_base = OTHER; note = Hydroxymethyldeoxyuridine
aaggtctgtcatgcagatgacggacagcgagatcactgactgatcaat

SEQ ID NO: 30 - DNA, 48 bp, synthetic construct
  source 1..48: mol_type = other DNA
  modified_base 7: mod_base = m5c
  modified_base 18: mod_base = m5c
  modified_base 41: mod_base = m5c
  modified_base 12: mod_base = OTHER; note = Hydroxymethyldeoxyuridine
  modified_base 33: mod_base = OTHER; note = Hydroxymethyldeoxyuridine
  modified_base 48: mod_base = OTHER; note = Hydroxymethyldeoxyuridine
aaggtccgtcatgcagacgacggacagcgagatcactgaccgatcaat

SEQ ID NO: 31 - DNA, 20 bp, synthetic construct
  source 1..20: mol_type = other DNA
  modified_base 10: mod_base = m5c
  modified_base 16: mod_base = OTHER; note = 5-hydroxymethylcytosine
ccgtcggaccgattcctaag

SEQ ID NO: 32 - DNA, 20 bp, synthetic construct
  source 1..20: mol_type = other DNA
  modified_base 16: mod_base = OTHER; note = 5-hydroxymethyldeoxyuridine
ccgtcggactgattcttaag

SEQ ID NO: 33 - DNA, 20 bp, synthetic construct
  source 1..20: mol_type = other DNA
ccgtcggactgattcttaag

SEQ ID NO: 34 - DNA, 20 bp, synthetic construct
  source 1..20: mol_type = other DNA
  modified_base 10: mod_base = m5c
  modified_base 16: mod_base = OTHER; note = beta-glycosyl-5-hydroxymethylcytosine
ccgtcggaccgattcctaag

SEQ ID NO: 35 - DNA, 20 bp, synthetic construct
  source 1..20: mol_type = other DNA
  modified_base 16: mod_base = OTHER; note = beta-glycosyl-5-hydroxymethylcytosine
ccgtcggactgattcctaag

SEQ ID NO: 36 - DNA, 20 bp, synthetic construct
  source 1..20: mol_type = other DNA
ccgtcggactgattcctaag

SEQ ID NO: 37 - protein, 188 aa, Gorilla gorilla
MDSLLMNRRKFLYQFKNVRWAKGRRETYLCYVVKRRDSATSFSLDFGYLRNKNGCHVELLFLRYISDWDLDPGRCYRVTWFTSWSPCYDCARHVADFLRGNPNLSLRIFTARLYFCEDRKAEPEGLRRLHRAGVQIAIMTFKENHERTFKAWEGLHENSVRLSRQLRRILLPLYEVDDLRDAFRTLGL

SEQ ID NO: 38 - protein, 198 aa, Mus musculus
MDSLLMKQKKFLYHFKNVRWAKGRHETYLCYVVKRRDSATSCSLDFGHLRNKSGCHVELLFLRYISDWDLDPGRCYRVTWFTSWSPCYDCARHVAEFLRWNPNLSLRIFTARLYFCEDRKAEPEGLRRLHRAGVQIGIMTFKDYFYCWNTFVENRERTFKAWEGLHENSVRLTRQLRRILLPLYEVDDLRDAFRMLGF

SEQ ID NO: 39 - protein, 191 aa, Gorilla gorilla
MSRKIWRSSGKNTTNHVEVNFIKKFTSERHFHPSISCSITWFLSWSPCWECSQAIREFLSQHPGVTLVIYVARLFWHMDQQNRQGLRDLVNSGVTIQIMRASEYYHCWRNFVNYPPGDEAHWPQYPPLWMMLYALELHCIILSLPPCLKISRRWQNHLTFFRLHLQNCHYQTIPPHILLATGLIHPSVAWR

SEQ ID NO: 40 - protein, 229 aa, Mus musculus
MSSETGPVAVDPTLRRRIEPHEFEVFFDPRELRKETCLLYEINWGGRHSVWRHTSQNTSNHVEVNFLEKFTTERYFRPNTRCSITWFLSWSPCGECSRAITEFLSRHPYVTLFIYIARLYHHTDQRNRQGLRDLISSGVTIQIMTEQEYCYCWRNFVNYPPSNEAYWPRYPHLWVKLYVLELYCIILGLPPCLKILRRKQPQLTFFTITLQTCHYQRIPPHLLWATGLK

SEQ ID NO: 41 - protein, 230 aa, Gorilla gorilla
MAQKEEAAAATEAAAATEAASQNGEDLENLDDPEKLKELIELPPFEIVTGERLPANFFKFQFRNVEYSSGRNKTFLCYVVEAQGKGGQVQASRGYLEDEHAAAHAEEAFFNTILPAFDPALRYNVTWYVSSSPCAACADRIIKTLSKTKNLRLLILVGRLFMWEEPEIQAALKKLKEAGCKLRIMKPQDFEYVWQNFVEQEEGESKAFQPWEDIQENFLYYEEKLADILK

SEQ ID NO: 42 - protein, 224 aa, Mus musculus
MAQKEEAAEAAAPASQNGDDLENLEDPEKLKELIDLPPFEIVTGVRLPVNFFKFQFRNVEYSSGRNKTFLCYVVEVQSKGGQAQATQGYLEDEHAGAHAEEAFFNTILPAFDPALKYNVTWYVSSSPCAACADRILKTLSKTKNLRLLILVSRLFMWEEPEVQAALKKLKEAGCKLRIMKPQDFEYIWQNFVEQEEGESKAFEPWEDIQENFLYYEEKLADILK

SEQ ID NO: 43 - protein, 382 aa, Gorilla gorilla
MNPQIRNPMERMYRGTFYNNFENEPILYGRSYNWLCYEVKIKRGRSNLLWNTGVFRGQMYSQPEHHAEMCFLSWFCGNQLPAYKCFQITWFVSWTPCPDCVAKLAEFLAEYPNVTLTISTARLYYYWERDYRRALCRLSQAGARMKIMDYEECAYCWENFVYKEGQQFMPWYKFDENYAFLHHTLKEILRHLMDPDTFTFNFNNDPLVLRRHQTYLCYEVERLDNGTWVLMDRHMGFLCNEAKNLLCGFYGRHAELRFLDLVPSLQLDPAQIYRVTWFISWSPCFSWGCAGQVCEFLQENTHMRLRIFAARIYDYDPLYKKALQMLRDAGAQVSIMTYDEFKHCWDTFVYRQGCPFQPWDGLEEHSQALSGRLQAILQNQGN

SEQ ID NO: 44 - protein, 382 aa, Macaca mulatta
MNPQIRNPMERMYRRTFNYNFENEPILYGRSYTWLCYEVKIRKDPSKLPWDTGVFRGQMYSKPEHHAEMCFLSWFCGNQLPAHKRFQITWFVSWTPCPDCVAKVAEFLAEYPNVTLTISAARLYYYWETDYRRALCRLRQAGARVKIMDYEEFAYCWENFVYNEDQSFMPWYKFDDNYAFLHHKLKEILRHLMDPDTFTSNFNNDLSVLGRHQTYLCYEVERLDNGTWVPMDQHWGFLCNQAKNVPRGDYGCHAELCFLDQVSSWQLDPAQTYRVTWFISWSPCFSWGCADQVYAFLQENTHVRLRIFAARIYDYNPLYQEALRTLRDAGAQVSIMTYDEFEYCWDTFVDRQGRPFQPWDGLDEHSQALSGRLRAILQNQGN

SEQ ID NO: 45 - protein, 190 aa, Gorilla gorilla
MNPQIRNPMKAMYPGTFYFQFKNLWEANDRNETWLCFTVEGIKRRSVVSWKTGVFRNQVDSETHCHAERCFLSWFCDDILSPNTNYQVTWYTSWSPCPECAGEVAEFLARHSNVNLTIFTARLYYFQDTDYQEGLRSLSQEGVAVKIMDYKDFKYCWENFVYNDDEPFKPWKGLKYNFRFLKRRLQEILE

SEQ ID NO: 46 - protein, 190 aa, Macaca mulatta
MNPQIRNPMKAMDPGTFYFQFKNLWEANNRNETWLCFTVEVIKQHSTVSWETGVFRNQVDLETHCHAERCFLSWFCEDILSPNTDYQVTWYTSWSPCLDCAGEVAKFLARHNNVMLTIYTARLYYSQYPNYQQGLRSLSEKGVSVKIMDYEDFKYCWEKFVYDDGEPFKPWKGLKTSFRFLKRRLREILQ

SEQ ID NO: 47 - protein, 386 aa, Pan troglodytes
MNPQIRNPMERMYRRTFYNHFENEPILYGRSYTWLCYEVKIKRGCSNLIWDTGVFRGPVLPKLQSNHRQEVYFQFENHAEMCFFSWFCGNRLPANRRFQITWFVSWNPCLPCVVKVTKFLAEHPNVTLTISAARLYYYQDREWRRVLRRLHKAGARVKIMDYKDFAHCWENFVYNEGQQFMPWYKFDDNYASLHRTLKEILRNPMEAMYPHVFYFHFKNLLKACGRNESWLCFTVDVTEHHPPVSWKRGVFRNPVDPETHCHAERCFLSWFCDDILSPNTNYQVTWYTSWSPCPECAREVAEFLARHSNVKLTIFTARLYHFWNTDYQEGLCSLSQEGASVKIMSYKDFVSCWKNFVYSDDEPFKPWKGLKTNFRLLKTMLREILQ

SEQ ID NO: 48 - protein, 374 aa, Macaca mulatta
MNPQIRNPMERMYRRTFNYNFENEPILYGRSYTWLCYEVKIRKDPSKLPWDTGVFRGQVYFQPQYHAEMCFLSWFCGNQLPAYKRFQITWFVSWNPCPDCVAKVTEFLAEHPNVTLTISVARLYYYRGKDWRRALCRLHQAGARVKIMDYEEFAYCWENFVYNEGQSFMPWDKFDDNYAFLHHKLKEILRNPMKAMYPHTFYFHFENLQKAYGRNETWLCFAVEIIKQHSTVPWKTGVFRNQVDPETHCHAERCFLSWFCDNTLSPKKNYQVTWYISWSPCPECAGEVAEFLATHSNVKLTIYTARLYYFWDTDYQEGLRSLSEEGASMEIMGYEDFKYCWENFVYNDGEPFKPWKGINTNFRFLERRLWKILQ

SEQ ID NO: 49 - protein, 373 aa, Gorilla gorilla
MKPQFRNTVERMYRGTFSYNFNNRPILSRRNTVWLCYEVKTKGPSRPPLDAKIFRGQVYFQPQYHAEMCFLSWFCGNQLPAYKCFQITCFVSWTPCPDCVAKLAEFLAEHPNVTLTISAARLYYYWERDYRRALRRLRQAGARVKIMDDEEFAYCWENFVYSEGQPFMPWHKFDDNYAFLHRTLKEILRNPMEAMYPHIFYFHFKNLLKAYGRNESWLCFTMEVIKHHSPVSWKRGVFRNQVDSETHCHAERCFLSWFCDDILSPNTNYQVTWYTSWSPCPECAGEVAEFLARHSNVNLTIFTARLYYFWDTDYQEGLRSLNQEGASVKIMGYKDFKYCWENFVYNDDEPFKPWKGLKYNFLFLDSKLQEILE

SEQ ID NO: 50 - protein, 373 aa, Macaca mulatta
MQPQYRNTVERMYRGTFFYNFNNRPILSRRNTVWLCYEVKTRGPSMPTWDTKIFRGQVYSKPEHHAEMCFLSRFCGNQLPAYKRFQITWFVSWTPCPDCVAKVAEFLAEHPNVTLTISAARLYYYWETDYRRALCRLRQAGARVKIMDYEEFAYCWENFVYNEGQSFMPWDKFDDNYAFLHHKLKEILRNPMEATYPHIFYFHFKNLRKAYGRNETWLCFTMEIIKQHSTVSWETGVFRNQVDPESRCHAERCFLSWFCEDILSPNTDYQVTWYTSWSPCLDCAGEVAEFLARHSNVKLAIFAARLYYFWDTHYQQGLRSLSEKGASVEIMGYKDFKYCWENFVYNGDEPFKPWKGLKYNFLFLDSKLQEILE

SEQ ID NO: 51 - protein, 384 aa, Gorilla gorilla
MTPQFRNTVERMYRDTFSYNFNNRPILSRRNTVWLCYEVKTKDPSRPPLDAKIFRGQVYSELKYHPEMRFFHWFSKWRKLHRDQEYEVTWYISWSPCTKCTRNVATFLAEDPKVTLTIFVARLYYFWDQDYQEALRSLCQKRDGPRATMKIMNYDEFQHCWSKFVYSQRELFEPWNNLPKYYMLLHIMLGEILRHSMDPPTFTSNFNNEHWVRGRHETYLCYEVERLHNDTWVLLNQRRGFLCNQAPHKHGFLEGRHAELCFLDVIPFWKLDLHQDYRVTCFTSWSPCFSCAQEMAKFISNKKHVSLCIFAARIYDDQGRCQEGLRTLAEAGAKISIMTYSEFKHCWDTFVYHQGCPFQPWDGLEEHSQALSGRLQAILQNQGN

SEQ ID NO: 52 - protein, 384 aa, Macaca mulatta
MNPQIRNMVEPMDPRTFVSNFNNRPILSGLNTVWLCCEVKTKDPSGPPLDAKIFQGKVLRSKAKYHPEMRFLQWFREWRQLHHDQEYKVTWYVSWSPCTRCANSVATFLAKDPKVTLTIFVARLYYFWKPNYQQALRILCQKRDGPHATMKIMNYNEFQDCWNKFVDGRGKPFKPWNNLPKHYTLLQATLGELLRHLMDPGTFTSNFNNKPWVSGQHETYLCYKVERLHNDTWVPLNQHRGFLRNQAPNIHGFPKGRHAELCFLDLIPFWKLDGQQYRVTCFTSWSPCFSCAQEMAKFISNNEHVSLCIFAARIYDDQGRYQEGLRTLHRDGAKIAMMNYSEFEYCWDTFVDCQGCPFQPWDGLDEHSQALSERLRAILQNQGN

SEQ ID NO: 53 - protein, 210 aa, Gorilla gorilla
MALLTAETFRLQFNNKLRLRRPYYRRKTLLCYQLTPQNGSMPTRGYFKNKKKCHAEICFINEIKSMGLDETQCYQVTCYLTWSPCSSCAWKLVDFIKAHDHLNLRIFASRLYYHWCKRQQEGLRLLCGSQVPVEVMGFPEFADCWENFVDHEKPLSFDPSKMLEELDKNSQAIKRRLERIKSRSVDVLENGLRSLQLGPVTPSSSRSNSR

SEQ ID NO: 54 - protein, 210 aa, Macaca mulatta
MALLTAKTFSLQFNNKRRVNKPYYPRKALLCYQLTPQNGSTPTRGHLKNKKKDHAEIRFINKIKSMGLDETQCYQVTCYLTWSPCPSCAGELVDFIKAHRHLNLRIFASRLYYHWRPNYQEGLLLLCGSQVPVEVMGLPEFTDCWENFVDHKEPPSFNPSEKLEELDKNSQAIKRRLERIKSRSVDVLENGLRSLQLGPVTPSSSIRNSR

SEQ ID NO: 55 - protein, 368 aa, Gorilla gorilla
MEPIYEEYLANHGTIVKPYYWLSFSLDCSNCPYHIRTGEEARVSLTEFCQIFGFPYGTTFPQTKHLTFYELKTSSGSLVQKGHASSCTGNYIHPESMLFEMNGYLDSAIYNNDSIRHIILYSNNSPCNEANHCCISKMYNFLITYPGITLSIYFSQLYHTEMDFPASAWNREALRSLASLWPRVVLSPISGGIWHSVLHSFISGVSGSHVFQPILTGRALADRHNAYEINAITGVKPYFTDVLLQTKRNPNTKAQEALESYPLNNAFPGQSFQMPSGQLQPNLPPDVRAPVVFVLVPLRDLPPMHMGQNPNKPRNIVRHLNMPQMSFQETEDLGRLPTGRSVEIVEITERFASSKEADEKKKKKKGKK

SEQ ID NO: 56 - protein, 374 aa, Mus musculus
MEPLYEEILTQGGTIVKPYYWLSLSLGCTNCPYHIRTGEEARVPYTEFHQTFGFPWSTYPQTKHLTFYELRSSSKNLIQKGLASNCTGSHNHPEAMLFEKNGYLDAVIFHNSNIRHIILYSNNSPCNEAKHCCISKMYNFLMNYPEVTLSVFFSQLYHTEKQFPTSAWNRKALQSLASLWPQVTLSPICGGLWHAILEKFVSNISGSTVPQPFIAGRILADRYNTYEINSIIAAKPYFTDGLLSRQKENQNREAWAAFEKHPLGSAAPAQRQPTRGQDPRTPAVLMLVSNRDLPPIHVGSTPQKPRTVVRHLNMLQLSSFKVKDVKKPPSGRPVEEVEVMKESARSQKANKKNRSQWKKQTLVIKPRICRLLER

SEQ ID NO: 57-58 - skipped (2 entries)

SEQ ID NO: 59 - protein, 199 aa, synthetic construct
MEASPASGPRHLMDPHIFTSNFNNGIGRHKTYLCYEVERLDNGTSVKMDQHRGFLHNQAKNLLCGFYGRHAELRFLDLVPSLQLDPAQIYRVTWFISWSPCFSWGCAGEVRAFLQENTHVRLRIFAARIWDYDPLYKEALQMLRDAGAQVSIMTYDEFKHCWDTFVDHQGCPFQPWDGLDEHSQALSGRLRAILQNQGN

SEQ ID NO: 60 - DNA, 101 bp, synthetic construct
  source 1..101: mol_type = other DNA
  modified_base 24: mod_base = m5c
  modified_base 26: mod_base = m5c
  modified_base 32: mod_base = m5c
  modified_base 37: mod_base = m5c
  modified_base 42: mod_base = m5c
  modified_base 54: mod_base = m5c
  modified_base 61: mod_base = m5c
  modified_base 67: mod_base = m5c
  modified_base 72: mod_base = m5c
  modified_base 47: mod_base = OTHER; note = 5-hydroxymethylcytosine
  modified_base 59: mod_base = OTHER; note = 5-hydroxymethylcytosine
  modified_base 64: mod_base = OTHER; note = 5-hydroxymethylcytosine
  modified_base 69: mod_base = OTHER; note = 5-hydroxymethylcytosine
  modified_base 75: mod_base = OTHER; note = 5-hydroxymethylcytosine
  modified_base 79: mod_base = OTHER; note = 5-hydroxymethylcytosine
  modified_base 83: mod_base = OTHER; note = 5-hydroxymethylcytosine
gaggtgtatggttgtactaatcactcctcgacgaatcgtaacacaacgtgcagccaaacgcttcgccacggcaacgtgcggactcgttgaagatgaggatg

SEQ ID NO: 61 - protein, 199 aa, synthetic construct
  VARIANT 130: note = X can be any amino acid
  VARIANT 133: note = X can be any amino acid
MEASPASGPRHLMDPHIFTSNFNNGIGRHKTYLCYEVERLDNGTSVKMDQHRGFLHNQAKNLLCGFYGRHAELRFLDLVPSLQLDPAQIYRVTWFISWSPCFSWGCAGEVRAFLQENTHVRLRIFAARIXDYXPLYKEALQMLRDAGAQVSIMTYDEFKHCWDTFVDHQGCPFQPWDGLDEHSQALSGRLRAILQNQGN

SEQ ID NO: 62 - protein, 199 aa, synthetic construct
  VARIANT 129: note = Can be L or I
  VARIANT 130: note = X can be A, G, F, H, Q, M, N, K, V, D, E, S, C, P or T, preferably, X is A or L or W
XXXXXXXXXXXXXXXXXXXXXXXXXXGRXXTXLCYXVXXXXXXXXXXXXXXXGXXXNXXXXXXXXXXXXHAEXXFXXXXXXXXXXXXXXYXXTWXXSWSPCXXXXCAXXXXXFLXXXXXXXLXIXXXRXXXXXXXXXXGLXXLXXXGXXXXXMXXXXFXXCWXXFVXXXXXXFXPWXXXXXXXXXXXXXLXXIXXXXXX

SEQ ID NO: 63 - protein, 199 aa, synthetic construct
  VARIANT 130: note = X can be any amino acid
  VARIANT 132: note = X can be any amino acid
MEASPASGPRHLMDPHIFTSNFNNGIGRHKTYLCYEVERLDNGTSVKMDQHRGFLHNQAKNLLCGFYGRHAELRFLDLVPSLQLDPAQIYRVTWFISWSPCFSWGCAGEVRAFLQENTHVRLRIFAARIXDXDPLYKEALQMLRDAGAQVSIMTYDEFKHCWDTFVDHQGCPFQPWDGLDEHSQALSGRLRAILQNQGN

SEQ ID NO: 64 - protein, 189 aa, synthetic construct
  VARIANT 130: note = A, G, F, H, Q, M, N, K, V, D, S, E, C, P, or T
  VARIANT 132: note = R, H, K, or Q
  VARIANT 133: note = W or C
MEASPASGPRHLMDPHTFYSNFNNKIGRHKTYLCYEVERLDNGTWVKMDQHRGFLHNQPRRHAELLFLDLVPSLQLDPAQIYRVTWFISWSPCFSCACEVRAFLQENTHVRLRIFAARIXDXXPLYKEALQMLRDAGAQVSIMTYDEFKHCWDTFVDHQGAPFQPWDGLDEHSQALSRRLRAILQNQGN

SEQ ID NO: 65 - protein, 199 aa, synthetic construct
  VARIANT 130: note = A, G, F, H, Q, M, N, K, V, D, S, E, C, P, or T
  VARIANT 132: note = R, H, K, or Q
  VARIANT 133: note = W or C
MEASPASGPRHLMDPHIFTSNFNNGIGRHKTYLCYEVERLDNGTSVKMDQHRGFLHNQAKNLLCGFYGRHAELRFLDLVPSLQLDPAQIYRVTWFISWSPCFSWGCAGEVRAFLQENTHVRLRIFAARIXDXXPLYKEALQMLRDAGAQVSIMTYDEFKHCWDTFVDHQGCPFQPWDGLDEHSQALSGRLRAILQNQGN

SEQ ID NO: 66 - protein, 189 aa, synthetic construct
  VARIANT 130: note = A, G, F, H, Q, M, N, K, V, D, S, E, C, P, or T
  VARIANT 132: note = R, H, K,or Q
  VARIANT 133: note = W or C
MEASPASGPRHLMDPHTFYSNFNNKIGRHKTYLCYEVERLDNGTWVKMDQHRGFLHNQPRRHAALLFLDLVPSLQLDPAQIYRVTWFISWSPCFSCACEVRAFLQENTHVRLRIFAARIXDXXPLYKEALQMLRDAGAQVSIMTYDEFKHCWDTFVDHQGAPFQPWDGLDEHSQALSRRLRAILQNQGN

SEQ ID NO: 67 - protein, 199 aa, synthetic construct
  VARIANT 130: note = A, G, F, H, Q, M, N, K, V, D, S, E, C, P, or T
  VARIANT 132: note = R, H, K, or Q
  VARIANT 133: note = W or C
MEASPASGPRHLMDPHIFTSNFNNGIGRHKTYLCYEVERLDNGTSVKMDQHRGFLHNQAKNLLCGFYGRHAALRFLDLVPSLQLDPAQIYRVTWFISWSPCFSWGCAGEVRAFLQENTHVRLRIFAARIXDXXPLYKEALQMLRDAGAQVSIMTYDEFKHCWDTFVDHQGCPFQPWDGLDEHSQALSGRLRAILQNQGN

SEQ ID NO: 68 - protein, 199 aa, synthetic construct
MEASPASGPRHLMDPHIFTSNFNNGIGRHKTYLCYEVERLDNGTSVKMDQHRGFLHNQAKNLLCGFYGRHAELRFLDLVPSLQLDPAQIYRVTWFISWSPCFSWGCAGEVRAFLQENTHVRLRIFAARIADHDPLYKEALQMLRDAGAQVSIMTYDEFKHCWDTFVDHQGAPFQPWDGLDEHSQALSGRLRAILQNQGN

SEQ ID NO: 69 - protein, 199 aa, synthetic construct
MEASPASGPRHLMDPHIFTSNFNNGIGRHKTYLCYEVERLDNGTSVKMDQHRGFLHNQAKNLLCGFYGRHAELRFLDLVPSLQLDPAQIYRVTWFISWSPCFSWGCAGEVRAFLQENTHVRLRIFAARIADHWPLYKEALQMLRDAGAQVSIMTYDEFKHCWDTFVDHQGCPFQPWDGLDEHSQALSGRLRAILQNQGN

SEQ ID NO: 70 - protein, 199 aa, synthetic construct
MEASPASGPRHLMDPHIFTSNFNNGIGRHKTYLCYEVERLDNGTSVKMDQHRGFLHNQAKNLLCGFYGRHAELLFLDLVPSLQLDPAQIYRVTWFISWSPCFSWGCAGEVRAFLQENTHVRLRIFAARIADHWPLYKEALQMLRDAGAQVSIMTYDEFKHCWDTFVDHQGCPFQPWDGLDEHSQALSGRLRAILQNQGN

SEQ ID NO: 71 - protein, 199 aa, synthetic construct
MEASPASGPRHLMDPHIFYSNFNNGIGRHKTYLCYEVERLDNGTSVKMDQHRGFLHNQAKNLLCGFYGRHAELLFLDLVPSLQLDPAQIYRVTWFISWSPCFSWGCAGEVRAFLQENTHVRLRIFAARIADHWPLYKEALQMLRDAGAQVSIMTYDEFKHCWDTFVDHQGCPFQPWDGLDEHSQALSGRLRAILQNQGN

SEQ ID NO: 72 - protein, 199 aa, synthetic construct
MEASPASGPRHLMDPHIFYSNFNNGIGRHKTYLCYEVERLDNGTSVKMDQHRGFLHNQAKNLLCGFYGRHAELLFLDLVPSLQLDPAQIYRVTWFISWSPCFSWGCAGEVRAFLQENTHVRLRIFAARIADHWPLYKEALQMLRDAGAQVSIMTYDEFKHCWDTFVDHQGAPFQPWDGLDEHSQALSGRLRAILQNQGN

SEQ ID NO: 73 - protein, 199 aa, synthetic construct
MEASPASGPRHLMDPHTFYSNFNNRIGRHKTYLCYEVERLDNGTSVKMDQHRGFLHNQAKNLLCGFYGRHAELLFLDLVPSLQLDPAQIYRVTWFISWSPCFSWGCAGEVRAFLQENTHVRLRIFAARIADHWPLYKEALQMLRDAGAQVSIMTYDEFKHCWDTFVDHQGAPFQPWDGLDEHSQALSGRLRAILQNQGN

SEQ ID NO: 74 - protein, 199 aa, synthetic construct
MEASPASGPRHLMDPHIFYSNFNNKIGRHKTYLCYEVERLDNGTWVKMDQHRGFLHNQAKNLLCGFYGRHAELLFLDLVPSLQLDPAQIYRVTWFISWSPCFSWGCAAEVRAFLQENTHVRLRIFAARIADHWPLYKEALQMLRDAGAQVSIMTYDEFKHCWDTFVDHQGAPFQPWDGLDEHSQALSRRLRAILQNQGN

SEQ ID NO: 75 - protein, 191 aa, synthetic construct
MEASPASGPRHLMDPHTFYSNFNNKIGRHKTYLCYEVERLDNGTWVKMDQHRGFLHNQPRRHAELLFLDLVPSLQLDPAQIYRVTWFISWSPCFSWGCACEVRAFLQENTHVRLRIFAARIADHWPLYKEALQMLRDAGAQVSIMTYDEFKHCWDTFVDHQGAPFQPWDGLDEHSQALSRRLRAILQNQGN

SEQ ID NO: 76 - protein, 191 aa, synthetic construct
MEASPASGPRHLMDPHTFYSNFNNKIGRHKTYLCYEVERLDNGTWVKMDQHRGFLHNQPRRHAELLFLDLVPSLQLDPAQIYRVTWFISWSPCFSWGCACEVRAFLQENTHVRLRIFCARIADHWPLYKEALQMLRDAGAQVSIMTYDEFKHCWDTFVDHQGAPFQPWDGLDEHSQALSRRLRAILQNQGN

SEQ ID NO: 77 - protein, 189 aa, synthetic construct
MEASPASGPRHLMDPHTFYSNFNNKIGRHKTYLCYEVERLDNGTWVKMDQHRGFLHNQPRRHAELLFLDLVPSLQLDPAQIYRVTWFISWSPCFSCACEVRAFLQENTHVRLRIFAARIADHWPLYKEALQMLRDAGAQVSIMTYDEFKHCWDTFVDHQGAPFQPWDGLDEHSQALSRRLRAILQNQGN

SEQ ID NO: 78 - protein, 199 aa, synthetic construct; identical to SEQ ID NO: 65
  VARIANT 130: note = F, L, I, or Y
  VARIANT 132: note = P or H
  VARIANT 133: note = W, D, K, or R

SEQ ID NO: 79 - protein, 199 aa, synthetic construct
  VARIANT 133: note = W, D, K, or R
MEASPASGPRHLMDPHIFTSNFNNGIGRHKTYLCYEVERLDNGTSVKMDQHRGFLHNQAKNLLCGFYGRHAELRFLDLVPSLQLDPAQIYRVTWFISWSPCFSWGCAGEVRAFLQENTHVRLRIFAARILDHXPLYKEALQMLRDAGAQVSIMTYDEFKHCWDTFVDHQGCPFQPWDGLDEHSQALSGRLRAILQNQGN

SEQ ID NO: 80 - protein, 199 aa, synthetic construct
MEASPASGPRHLMDPHIFTSNFNNGIGRHKTYLCYEVERLDNGTSVKMDQHRGFLHNQAKNLLCGFYGRHAELRFLDLVPSLQLDPAQIYRVTWFISWSPCFSWGCAGEVRAFLQENTHVRLRIFAARILDHWPLYKEALQMLRDAGAQVSIMTYDEFKHCWDTFVDHQGCPFQPWDGLDEHSQALSGRLRAILQNQGN

SEQ ID NO: 81 - protein, 199 aa, synthetic construct
MEASPASGPRHLMDPHIFTSNFNNGIGRHKTYLCYEVERLDNGTSVKMDQHRGFLHNQAKNLLCGFYGRHAELRFLDLVPSLQLDPAQIYRVTWFISWSPCFSWGCAGEVRAFLQENTHVRLRIFAARIFDPWPLYKEALQMLRDAGAQVSIMTYDEFKHCWDTFVDHQGCPFQPWDGLDEHSQALSGRLRAILQNQGN

SEQ ID NO: 82 - protein, 199 aa, synthetic construct
MEASPASGPRHLMDPHIFTSNFNNGIGRHKTYLCYEVERLDNGTSVKMDQHRGFLHNQAKNLLCGFYGRHAELRFLDLVPSLQLDPAQIYRVTWFISWSPCFSWGCAGEVRAFLQENTHVRLRIFAARIYDPWPLYKEALQMLRDAGAQVSIMTYDEFKHCWDTFVDHQGCPFQPWDGLDEHSQALSGRLRAILQNQGN

SEQ ID NO: 83 - protein, 199 aa, synthetic construct
MEASPASGPRHLMDPHIFTSNFNNGIGRHKTYLCYEVERLDNGTSVKMDQHRGFLHNQAKNLLCGFYGRHAALRFLDLVPSLQLDPAQIYRVTWFISWSPCFSWGCAGEVRAFLQENTHVRLRIFAARIYDYDPLYKEALQMLRDAGAQVSIMTYDEFKHCWDTFVDHQGCPFQPWDGLDEHSQALSGRLRAILQNQGN

SEQ ID NO: 84 - protein, 199 aa, synthetic construct
MEASPASGPRHLMDPHIFTSNFNNGIGRHKTYLCYEVERLDNGTSVKMDQHRGFLHNQAKNLLCGFYGRHAALRFLDLVPSLQLDPAQIYRVTWFISWSPCFSWGCAGEVRAFLQENTHVRLRIFAARIADYDPLYKEALQMLRDAGAQVSIMTYDEFKHCWDTFVDHQGCPFQPWDGLDEHSQALSGRLRAILQNQGN

SEQ ID NO: 85 - protein, 199 aa, synthetic construct
MEASPASGPRHLMDPHIFTSNFNNGIGRHKTYLCYEVERLDNGTSVKMDQHRGFLHNQAKNLLCGFYGRHAALRFLDLVPSLQLDPAQIYRVTWFISWSPCFSWGCAGEVRAFLQENTHVRLRIFAARIADHDPLYKEALQMLRDAGAQVSIMTYDEFKHCWDTFVDHQGCPFQPWDGLDEHSQALSGRLRAILQNQGN

SEQ ID NO: 86 - protein, 199 aa, synthetic construct
MEASPASGPRHLMDPHIFTSNFNNGIGRHKTYLCYEVERLDNGTSVKMDQHRGFLHNQAKNLLCGFYGRHAALRFLDLVPSLQLDPAQIYRVTWFISWSPCFSWGCAGEVRAFLQENTHVRLRIFAARIADHDPLYKEALQMLRDAGAQVSIMTYDEFKHCWDTFVDHQGAPFQPWDGLDEHSQALSGRLRAILQNQGN

SEQ ID NO: 87 - protein, 199 aa, synthetic construct
MEASPASGPRHLMDPHIFTSNFNNGIGRHKTYLCYEVERLDNGTSVKMDQHRGFLHNQAKNLLCGFYGRHAALRFLDLVPSLQLDPAQIYRVTWFISWSPCFSWGCAGEVRAFLQENTHVRLRIFAARIADHWPLYKEALQMLRDAGAQVSIMTYDEFKHCWDTFVDHQGCPFQPWDGLDEHSQALSGRLRAILQNQGN

SEQ ID NO: 88 - protein, 199 aa, synthetic construct
MEASPASGPRHLMDPHIFTSNFNNGIGRHKTYLCYEVERLDNGTSVKMDQHRGFLHNQAKNLLCGFYGRHAALLFLDLVPSLQLDPAQIYRVTWFISWSPCFSWGCAGEVRAFLQENTHVRLRIFAARIADHWPLYKEALQMLRDAGAQVSIMTYDEFKHCWDTFVDHQGCPFQPWDGLDEHSQALSGRLRAILQNQGN

SEQ ID NO: 89 - protein, 199 aa, synthetic construct
MEASPASGPRHLMDPHIFYSNFNNGIGRHKTYLCYEVERLDNGTSVKMDQHRGFLHNQAKNLLCGFYGRHAALLFLDLVPSLQLDPAQIYRVTWFISWSPCFSWGCAGEVRAFLQENTHVRLRIFAARIADHWPLYKEALQMLRDAGAQVSIMTYDEFKHCWDTFVDHQGCPFQPWDGLDEHSQALSGRLRAILQNQGN

SEQ ID NO: 90 - protein, 199 aa, synthetic construct
MEASPASGPRHLMDPHIFYSNFNNGIGRHKTYLCYEVERLDNGTSVKMDQHRGFLHNQAKNLLCGFYGRHAALLFLDLVPSLQLDPAQIYRVTWFISWSPCFSWGCAGEVRAFLQENTHVRLRIFAARIADHWPLYKEALQMLRDAGAQVSIMTYDEFKHCWDTFVDHQGAPFQPWDGLDEHSQALSGRLRAILQNQGN

SEQ ID NO: 91 - protein, 199 aa, synthetic construct
MEASPASGPRHLMDPHTFYSNFNNRIGRHKTYLCYEVERLDNGTSVKMDQHRGFLHNQAKNLLCGFYGRHAALLFLDLVPSLQLDPAQIYRVTWFISWSPCFSWGCAGEVRAFLQENTHVRLRIFAARIADHWPLYKEALQMLRDAGAQVSIMTYDEFKHCWDTFVDHQGAPFQPWDGLDEHSQALSGRLRAILQNQGN

SEQ ID NO: 92 - protein, 199 aa, synthetic construct
MEASPASGPRHLMDPHIFYSNFNNKIGRHKTYLCYEVERLDNGTWVKMDQHRGFLHNQAKNLLCGFYGRHAALLFLDLVPSLQLDPAQIYRVTWFISWSPCFSWGCAAEVRAFLQENTHVRLRIFAARIADHWPLYKEALQMLRDAGAQVSIMTYDEFKHCWDTFVDHQGAPFQPWDGLDEHSQALSRRLRAILQNQGN

SEQ ID NO: 93 - protein, 191 aa, synthetic construct
MEASPASGPRHLMDPHTFYSNFNNKIGRHKTYLCYEVERLDNGTWVKMDQHRGFLHNQPRRHAALLFLDLVPSLQLDPAQIYRVTWFISWSPCFSWGCACEVRAFLQENTHVRLRIFAARIADHWPLYKEALQMLRDAGAQVSIMTYDEFKHCWDTFVDHQGAPFQPWDGLDEHSQALSRRLRAILQNQGN

SEQ ID NO: 94 - protein, 191 aa, synthetic construct
MEASPASGPRHLMDPHTFYSNFNNKIGRHKTYLCYEVERLDNGTWVKMDQHRGFLHNQPRRHAALLFLDLVPSLQLDPAQIYRVTWFISWSPCFSWGCACEVRAFLQENTHVRLRIFCARIADHWPLYKEALQMLRDAGAQVSIMTYDEFKHCWDTFVDHQGAPFQPWDGLDEHSQALSRRLRAILQNQGN

SEQ ID NO: 95 - protein, 189 aa, synthetic construct
MEASPASGPRHLMDPHTFYSNFNNKIGRHKTYLCYEVERLDNGTWVKMDQHRGFLHNQPRRHAALLFLDLVPSLQLDPAQIYRVTWFISWSPCFSCACEVRAFLQENTHVRLRIFAARIADHWPLYKEALQMLRDAGAQVSIMTYDEFKHCWDTFVDHQGAPFQPWDGLDEHSQALSRRLRAILQNQGN

SEQ ID NO: 96 - protein, 199 aa, synthetic construct
MEASPASGPRHLMDPHIFTSNFNNGIGRHKTYLCYEVERLDNGTSVKMDQHRGFLHNQAKNLLCGFYGRHAALRFLDLVPSLQLDPAQIYRVTWFISWSPCFSWGCAGEVRAFLQENTHVRLRIFAARILDHWPLYKEALQMLRDAGAQVSIMTYDEFKHCWDTFVDHQGCPFQPWDGLDEHSQALSGRLRAILQNQGN

SEQ ID NO: 97 - protein, 199 aa, synthetic construct
MEASPASGPRHLMDPHIFTSNFNNGIGRHKTYLCYEVERLDNGTSVKMDQHRGFLHNQAKNLLCGFYGRHAALRFLDLVPSLQLDPAQIYRVTWFISWSPCFSWGCAGEVRAFLQENTHVRLRIFAARIFDPWPLYKEALQMLRDAGAQVSIMTYDEFKHCWDTFVDHQGCPFQPWDGLDEHSQALSGRLRAILQNQGN

SEQ ID NO: 98 - protein, 199 aa, synthetic construct
MEASPASGPRHLMDPHIFTSNFNNGIGRHKTYLCYEVERLDNGTSVKMDQHRGFLHNQAKNLLCGFYGRHAALRFLDLVPSLQLDPAQIYRVTWFISWSPCFSWGCAGEVRAFLQENTHVRLRIFAARIYDPWPLYKEALQMLRDAGAQVSIMTYDEFKHCWDTFVDHQGCPFQPWDGLDEHSQALSGRLRAILQNQGN

SEQ ID NO: 99 - protein, 199 aa, synthetic construct; identical to SEQ ID NO: 67
  VARIANT 130: note = F, L, I,or Y
  VARIANT 132: note = P or H
  VARIANT 133: note = W, D, K, or R

SEQ ID NO: 100 - protein, 199 aa, synthetic construct
  VARIANT 133: note = W, D, K, or R
MEASPASGPRHLMDPHIFTSNFNNGIGRHKTYLCYEVERLDNGTSVKMDQHRGFLHNQAKNLLCGFYGRHAALRFLDLVPSLQLDPAQIYRVTWFISWSPCFSWGCAGEVRAFLQENTHVRLRIFAARILDHXPLYKEALQMLRDAGAQVSIMTYDEFKHCWDTFVDHQGCPFQPWDGLDEHSQALSGRLRAILQNQGN

SEQ ID NO: 101 - protein, 199 aa, synthetic construct
  VARIANT 133: note = A, G, S, or T
MEASPASGPRHLMDPHIFTSNFNNGIGRHKTYLCYEVERLDNGTSVKMDQHRGFLHNQAKNLLCGFYGRHAELRFLDLVPSLQLDPAQIYRVTWFISWSPCFSWGCAGEVRAFLQENTHVRLRIFAARIDDYXPLYKEALQMLRDAGAQVSIMTYDEFKHCWDTFVDHQGCPFQPWDGLDEHSQALSGRLRAILQNQGN

SEQ ID NO: 102 - protein, 199 aa, synthetic construct
  VARIANT 132: note = H, R, or K
  VARIANT 133: note = A, G, S, or T
MEASPASGPRHLMDPHIFTSNFNNGIGRHKTYLCYEVERLDNGTSVKMDQHRGFLHNQAKNLLCGFYGRHAELRFLDLVPSLQLDPAQIYRVTWFISWSPCFSWGCAGEVRAFLQENTHVRLRIFAARIDDXXPLYKEALQMLRDAGAQVSIMTYDEFKHCWDTFVDHQGCPFQPWDGLDEHSQALSGRLRAILQNQGN

SEQ ID NO: 103 - protein, 199 aa, synthetic construct
MEASPASGPRHLMDPHIFTSNFNNGIGRHKTYLCYEVERLDNGTSVKMDQHRGFLHNQAKNLLCGFYGRHAELRFLDLVPSLQLDPAQIYRVTWFISWSPCFSWGCAGEVRAFLQENTHVRLRIFAARIDDHAPLYKEALQMLRDAGAQVSIMTYDEFKHCWDTFVDHQGCPFQPWDGLDEHSQALSGRLRAILQNQGN

SEQ ID NO: 104 - protein, 199 aa, synthetic construct
MEASPASGPRHLMDPHIFTSNFNNGIGRHKTYLCYEVERLDNGTSVKMDQHRGFLHNQAKNLLCGFYGRHAELRFLDLVPSLQLDPAQIYRVTWFISWSPCFSWGCAGEVRAFLQENTHVRLRIFAARIDDHTPLYKEALQMLRDAGAQVSIMTYDEFKHCWDTFVDHQGCPFQPWDGLDEHSQALSGRLRAILQNQGN

SEQ ID NO: 105 - protein, 199 aa, synthetic construct
MEASPASGPRHLMDPHIFTSNFNNGIGRHKTYLCYEVERLDNGTSVKMDQHRGFLHNQAKNLLCGFYGRHAELRFLDLVPSLQLDPAQIYRVTWFISWSPCFSWGCAGEVRAFLQENTHVRLRIFAARIDDKSPLYKEALQMLRDAGAQVSIMTYDEFKHCWDTFVDHQGCPFQPWDGLDEHSQALSGRLRAILQNQGN

SEQ ID NO: 106 - protein, 199 aa, synthetic construct
MEASPASGPRHLMDPHIFTSNFNNGIGRHKTYLCYEVERLDNGTSVKMDQHRGFLHNQAKNLLCGFYGRHAELRFLDLVPSLQLDPAQIYRVTWFISWSPCFSWGCAGEVRAFLQENTHVRLRIFAARIDDKTPLYKEALQMLRDAGAQVSIMTYDEFKHCWDTFVDHQGCPFQPWDGLDEHSQALSGRLRAILQNQGN

SEQ ID NO: 107 - protein, 199 aa, synthetic construct
MEASPASGPRHLMDPHIFTSNFNNGIGRHKTYLCYEVERLDNGTSVKMDQHRGFLHNQAKNLLCGFYGRHAELRFLDLVPSLQLDPAQIYRVTWFISWSPCFSWGCAGEVRAFLQENTHVRLRIFAARIDDRSPLYKEALQMLRDAGAQVSIMTYDEFKHCWDTFVDHQGCPFQPWDGLDEHSQALSGRLRAILQNQGN

SEQ ID NO: 108 - protein, 199 aa, synthetic construct
  VARIANT 133: note = A, G, S, or T
MEASPASGPRHLMDPHIFTSNFNNGIGRHKTYLCYEVERLDNGTSVKMDQHRGFLHNQAKNLLCGFYGRHAALRFLDLVPSLQLDPAQIYRVTWFISWSPCFSWGCAGEVRAFLQENTHVRLRIFAARIDDYXPLYKEALQMLRDAGAQVSIMTYDEFKHCWDTFVDHQGCPFQPWDGLDEHSQALSGRLRAILQNQGN

SEQ ID NO: 109 - protein, 199 aa, synthetic construct
  VARIANT 132: note = H, R, or K
  VARIANT 133: note = A, G, S, or T
MEASPASGPRHLMDPHIFTSNFNNGIGRHKTYLCYEVERLDNGTSVKMDQHRGFLHNQAKNLLCGFYGRHAALRFLDLVPSLQLDPAQIYRVTWFISWSPCFSWGCAGEVRAFLQENTHVRLRIFAARIDDXXPLYKEALQMLRDAGAQVSIMTYDEFKHCWDTFVDHQGCPFQPWDGLDEHSQALSGRLRAILQNQGN

SEQ ID NO: 110-113 - skipped (4 entries)

SEQ ID NO: 114 - protein, 191 aa, synthetic construct
MEASPASGPRHLMDPHTFYSNFNNKIGRHKTYLCYEVERLDNGTWVKMDQHRGFLHNQPRRHAELLFLDLVPSLQLDPAQIYRVTWFISWSPCFSWGCACEVRAFLQENTHVRLRIFCARIYDYDPLYKEALQMLRDAGAQVSIMTYDEFKHCWDTFVDHQGAPFQPWDGLDEHSQALSRRLRAILQNQGN

SEQ ID NO: 115 - protein, 191 aa, synthetic construct
  VARIANT 122: note = X can be any amino acid
  VARIANT 124: note = X can be any amino acid
  VARIANT 125: note = X can be any amino acid
MEASPASGPRHLMDPHTFYSNFNNKIGRHKTYLCYEVERLDNGTWVKMDQHRGFLHNQPRRHAELLFLDLVPSLQLDPAQIYRVTWFISWSPCFSWGCACEVRAFLQENTHVRLRIFCARIXDXXPLYKEALQMLRDAGAQVSIMTYDEFKHCWDTFVDHQGAPFQPWDGLDEHSQALSRRLRAILQNQGN

SEQ ID NO: 116 - protein, 191 aa, synthetic construct; identical to SEQ ID NO: 115
  VARIANT 122: note = A, G, F, H, Q, M, N, K, V, D, S, E, C, P, T
  VARIANT 124: note = R, H, K, or Q
  VARIANT 125: note = W or C

SEQ ID NO: 117 - protein, 191 aa, synthetic construct; identical to SEQ ID NO: 115
  VARIANT 122: note = F, L, I, or Y
  VARIANT 124: note = P or H
  VARIANT 125: note = W, D, K, or R

SEQ ID NO: 118 - protein, 191 aa, synthetic construct; identical to SEQ ID NO: 115
  VARIANT 122: note = Y, A, F, L, W
  VARIANT 123: note = Y or H
  VARIANT 125: note = D or W

SEQ ID NO: 119 - protein, 191 aa, synthetic construct
MEASPASGPRHLMDPHTFYSNFNNKIGRHKTYLCYEVERLDNGTWVKMDQHRGFLHNQPRRHAELLFLDLVPSLQLDPAQIYRVTWFISWSPCFSWGCACEVRAFLQENTHVRLRIFCARIADHVPLYKEALQMLRDAGAQVSIMTYDEFKHCWDTFVDHQGAPFQPWDGLDEHSQALSRRLRAILQNQGN

SEQ ID NO: 120 - protein, 191 aa, synthetic construct
  VARIANT 124: note = R, H, or K
  VARIANT 125: note = A, G, S, or T
MEASPASGPRHLMDPHTFYSNFNNKIGRHKTYLCYEVERLDNGTWVKMDQHRGFLHNQPRRHAELLFLDLVPSLQLDPAQIYRVTWFISWSPCFSWGCACEVRAFLQENTHVRLRIFCARIDDXXPLYKEALQMLRDAGAQVSIMTYDEFKHCWDTFVDHQGAPFQPWDGLDEHSQALSRRLRAILQNQGN

SEQ ID NO: 121 - protein, 190 aa, synthetic construct
MEASPASGPRHLMDPHTFYSNFNNKIGRHKTYLCYEVERLDNGTWVKMDQHRGFLHNQPRRHAELLFLDLVPSLQLDPAQIYRVTWFISWSPCFSWCACEVRAFLQENTHVRLRIFCARIYDYDPLYKEALQMLRDAGAQVSIMTYDEFKHCWDTFVDHQGAPFQPWDGLDEHSQALSRRLRAILQNQGN

SEQ ID NO: 122 - protein, 190 aa, synthetic construct
  VARIANT 121: note = X can be any amino acid
  VARIANT 123: note = X can be any amino acid
  VARIANT 124: note = X can be any amino acid
MEASPASGPRHLMDPHTFYSNFNNKIGRHKTYLCYEVERLDNGTWVKMDQHRGFLHNQPRRHAELLFLDLVPSLQLDPAQIYRVTWFISWSPCFSWCACEVRAFLQENTHVRLRIFCARIXDXXPLYKEALQMLRDAGAQVSIMTYDEFKHCWDTFVDHQGAPFQPWDGLDEHSQALSRRLRAILQNQGN

SEQ ID NO: 123 - protein, 190 aa, synthetic construct; identical to SEQ ID NO: 122
  VARIANT 121: note = A, G, F, H, Q, M, N, K, V, D, S, E, C, P, or T
  VARIANT 123: note = R, H, K, or Q
  VARIANT 124: note = W or C

SEQ ID NO: 124 - protein, 190 aa, synthetic construct; identical to SEQ ID NO: 122
  VARIANT 121: note = F, L, I, or Y
  VARIANT 123: note = P or H
  VARIANT 124: note = W, D, K, or R

SEQ ID NO: 125 - protein, 190 aa, synthetic construct
  VARIANT 121: note = Y, A, F, L, or W
  VARIANT 123: note = Y or H
  VARIANT 124: note = D or W
MEASPASGPRHLMDPHTFYSNFNNKIGRHKTYLCYEVERLDNGTWVKMDQHRGFLHNQPRRHAELLFLDLVPSLQLDPAQIYRVTWFISWSPCFVPGCACEVRAFLQENTHVRLRIFCARXDXXWLYKEALQMLRDAGAQVSIMTYDEFKHCWDTFVDHQGAPFQPWDGLDEHSQALSRRLRAILQNQGN

SEQ ID NO: 126 - protein, 190 aa, synthetic construct
MEASPASGPRHLMDPHTFYSNFNNKIGRHKTYLCYEVERLDNGTWVKMDQHRGFLHNQPRRHAELLFLDLVPSLQLDPAQIYRVTWFISWSPCFSWCACEVRAFLQENTHVRLRIFCARIADHVPLYKEALQMLRDAGAQVSIMTYDEFKHCWDTFVDHQGAPFQPWDGLDEHSQALSRRLRAILQNQGN

SEQ ID NO: 127 - protein, 190 aa, synthetic construct
  VARIANT 123: note = R, H, or K
  VARIANT 124: note = A, G, S, or T
MEASPASGPRHLMDPHTFYSNFNNKIGRHKTYLCYEVERLDNGTWVKMDQHRGFLHNQPRRHAELLFLDLVPSLQLDPAQIYRVTWFISWSPCFSWCACEVRAFLQENTHVRLRIFCARIDDXXPLYKEALQMLRDAGAQVSIMTYDEFKHCWDTFVDHQGAPFQPWDGLDEHSQALSRRLRAILQNQGN

SEQ ID NO: 128 - skipped

SEQ ID NO: 129 - protein, 199 aa, synthetic construct
  VARIANT 132: note = H, R, or K
  VARIANT 133: note = A, G, S, or T
MEASPASGPRHLMDPHIFTSNFNNGIGRHKTYLCYEVERLDNGTSVKMDQHRGFLHNQAKNLLCGFYGRHAELLFLDLVPSLQLDPAQIYRVTWFISWSPCFSWGCAGEVRAFLQENTHVRLRIFAARIDDXXPLYKEALQMLRDAGAQVSIMTYDEFKHCWDTFVDHQGCPFQPWDGLDEHSQALSGRLRAILQNQGN

SEQ ID NO: 130 - protein, 199 aa, synthetic construct
  VARIANT 132: note = H, R, or K
  VARIANT 133: note = A, G, S, or T
MEASPASGPRHLMDPHIFYSNFNNGIGRHKTYLCYEVERLDNGTSVKMDQHRGFLHNQAKNLLCGFYGRHAELLFLDLVPSLQLDPAQIYRVTWFISWSPCFSWGCAGEVRAFLQENTHVRLRIFAARIDDXXPLYKEALQMLRDAGAQVSIMTYDEFKHCWDTFVDHQGCPFQPWDGLDEHSQALSGRLRAILQNQGN

SEQ ID NO: 131 - protein, 199 aa, synthetic construct
  VARIANT 132: note = H, R, or K
  VARIANT 133: note = A, G, S, or T
MEASPASGPRHLMDPHIFYSNFNNGIGRHKTYLCYEVERLDNGTSVKMDQHRGFLHNQAKNLLCGFYGRHAELLFLDLVPSLQLDPAQIYRVTWFISWSPCFSWGCAGEVRAFLQENTHVRLRIFAARIDDXXPLYKEALQMLRDAGAQVSIMTYDEFKHCWDTFVDHQGAPFQPWDGLDEHSQALSGRLRAILQNQGN

SEQ ID NO: 132 - protein, 199 aa, synthetic construct
  VARIANT 132: note = H, R, or K
  VARIANT 133: note = A, G, S, or T
MEASPASGPRHLMDPHTFYSNFNNRIGRHKTYLCYEVERLDNGTSVKMDQHRGFLHNQAKNLLCGFYGRHAELLFLDLVPSLQLDPAQIYRVTWFISWSPCFSWGCAGEVRAFLQENTHVRLRIFAARIDDXXPLYKEALQMLRDAGAQVSIMTYDEFKHCWDTFVDHQGAPFQPWDGLDEHSQALSGRLRAILQNQGN

SEQ ID NO: 133 - protein, 199 aa, synthetic construct
  VARIANT 132: note = H, R, or K
  VARIANT 133: note = A, G, S, or T
MEASPASGPRHLMDPHIFYSNFNNRIGRHKTYLCYEVERLDNGTWVKMDQHRGFLHNQAKNLLCGFYGRHAELLFLDLVPSLQLDPAQIYRVTWFISWSPCFSWGCAAEVRAFLQENTHVRLRIFAARIDDXXPLYKEALQMLRDAGAQVSIMTYDEFKHCWDTFVDHQGAPFQPWDGLDEHSQALSRRLRAILQNQGN

SEQ ID NO: 134 - protein, 191 aa, synthetic construct
  VARIANT 132: note = H, R, or K
  VARIANT 133: note = A, G, S, or T
MEASPASGPRHLMDPHIFYSNFNNRIGRHKTYLCYEVERLDNGTWVKMDQHRGFLHNQPRRHAELLFLDLVPSLQLDPAQIYRVTWFISWSPCFSWGCACEVRAFLQENTHVRLRIFAARIDDXXPLYKEALQMLRDAGAQVSIMTYDEFKHCWDTFVDHQGAPFQPWDGLDEHSQALSRRLRAILQNQGN

SEQ ID NO: 135 - protein, 191 aa, synthetic construct
  VARIANT 132: note = H, R, or K
  VARIANT 133: note = A, G, S, or T
MEASPASGPRHLMDPHIFYSNFNNRIGRHKTYLCYEVERLDNGTWVKMDQHRGFLHNQPRRHAELLFLDLVPSLQLDPAQIYRVTWFISWSPCFSWGCACEVRAFLQENTHVRLRIFCARIDDXXPLYKEALQMLRDAGAQVSIMTYDEFKHCWDTFVDHQGAPFQPWDGLDEHSQALSRRLRAILQNQGN

SEQ ID NO: 136 - protein, 189 aa, synthetic construct
  VARIANT 132: note = H, R, or K
  VARIANT 133: note = A, G, S, or T
MEASPASGPRHLMDPHIFYSNFNNRIGRHKTYLCYEVERLDNGTWVKMDQHRGFLHNQPRRHAELLFLDLVPSLQLDPAQIYRVTWFISWSPCFSCACEVRAFLQENTHVRLRIFAARIDDXXPLYKEALQMLRDAGAQVSIMTYDEFKHCWDTFVDHQGAPFQPWDGLDEHSQALSRRLRAILQNQGN

SEQ ID NO: 137 - protein, 199 aa, synthetic construct
MEASPASGPRHLMDPHIFTSNFNNGIGRHKTYLCYEVERLDNGTSVKMDQHRGFLHNQAKNLLCGFYGRHAELRFLDLVPSLQLDPAQIYRVTWFISWSPCFSWGCAGEVRAFLQENTHVRLRIFAARIYDYWPLYKEALQMLRDAGAQVSIMTYDEFKHCWDTFVDHQGCPFQPWDGLDEHSQALSGRLRAILQNQGN

SEQ ID NO: 138 - protein, 199 aa, synthetic construct
  VARIANT 130: note = A, G, F, H, Q, M, N, K, V, D, E, S, C, P or T
  VARIANT 132: note = R, H, K, or Q
MEASPASGPRHLMDPHIFTSNFNNGIGRHKTYLCYEVERLDNGTSVKMDQHRGFLHNQAKNLLCGFYGRHAELRFLDLVPSLQLDPAQIYRVTWFISWSPCFSWGCAGEVRAFLQENTHVRLRIFAARIXDXVPLYKEALQMLRDAGAQVSIMTYDEFKHCWDTFVDHQGCPFQPWDGLDEHSQALSGRLRAILQNQGN

SEQ ID NO: 139 - protein, 199 aa, synthetic construct; identical to SEQ ID NO: 102
  VARIANT 132: note = H, R, or K
  VARIANT 133: note = A, G, S, or T

SEQ ID NO: 140-195 - skipped (56 entries)

SEQ ID NO: 196 - protein, 199 aa, synthetic construct
  VARIANT 1..12: note = One or more may be removed
  VARIANT 11: note = H, P, R, L, or E
  VARIANT 12: note = L, W, or A
  VARIANT 14: note = D or Y
  VARIANT 16: note = H, L, W, or D
  VARIANT 17: note = I or T
  VARIANT 19: note = T, Y, I, L, F, or W
  VARIANT 20: note = S, F, W, Y, E, H, or I
  VARIANT 21: note = N, H, W, or Q
  VARIANT 25: note = G, R, L, V, A, D, or K
  VARIANT 26: note = I, R, L, A, or removed
  VARIANT 27: note = G, I, L, F, Y, R, C, or removed
  VARIANT 28: note = R or V
  VARIANT 29: note = H or R
  VARIANT 31: note = T, I, F, or W
  VARIANT 61..68: note = One or mroe may be removed
  VARIANT 34: note = C, L, I, V, or R
  VARIANT 38: note = E, W, or  Y
  VARIANT 39: note = R or L
  VARIANT 41: note = D or K
  VARIANT 42: note = N, G, or D
  VARIANT 45: note = S, T, W, or R
  VARIANT 47: note = K or P
  VARIANT 48: note = M, E, K, Q, S, L, D, or N
  VARIANT 51: note = H or L
  VARIANT 54: note = F or V
  VARIANT 56: note = H or R
  VARIANT 57: note = N or D
  VARIANT 59: note = P or L
  VARIANT 60: note = K, P, G, or R
  VARIANT 62: note = L or P
  VARIANT 72: note = E or A
  VARIANT 73: note = L or A
  VARIANT 74: note = R, N, L, C, or I
  VARIANT 77: note = D or R
  VARIANT 78: note = L or H
  VARIANT 79: note = V or L
  VARIANT 80: note = P, G, S, K, L, W, R, F, E, Y, D, H, Q, T, or V
  VARIANT 81: note = S or W
  VARIANT 85: note = D, I, or L
  VARIANT 87: note = A or R
  VARIANT 89: note = I, T, R, H, C, Q, S, or D
  VARIANT 90: note = Y or G
  VARIANT 91: note = R or L
  VARIANT 93: note = T or I
  VARIANT 94: note = W or L
  VARIANT 96: note = I or T
  VARIANT 97: note = S, L, or Y
  VARIANT 101: note = C or W
  VARIANT 102: note = F or N
  VARIANT 103: note = S, F, Y, H, R, W, L, M, K, T, I, D, Q, or C
  VARIANT 104: note = W, R, L, or removed
  VARIANT 105: note = G, S, L, W, Y, N, K, or removed
  VARIANT 106: note = C, I, T, S, or K
  VARIANT 107: note = A or F
  VARIANT 108: note = G, C, I, P, F, A, E, D, Q, Y, H, L, K, R, M, W, or S
  VARIANT 109: note = E, Q, W, L, or T
  VARIANT 110: note = V, L, or W
  VARIANT 111: note = R, A, V, E, or Q
  VARIANT 112: note = A, F, D, H, T, or Y
  VARIANT 114: note = L or G
  VARIANT 115: note = Q, K, L, W, M, Y, or C
  VARIANT 116: note = E, L, F, or V
  VARIANT 117: note = N, W, or Y
  VARIANT 118: note = T, W, P, N, or K
  VARIANT 119: note = H or W
  VARIANT 120: note = V, H, or N
  VARIANT 122: note = L or D
  VARIANT 123: note = R or H
  VARIANT 126: note = A, V, F, I, L, C, or S
  VARIANT 128: note = R or Y
  VARIANT 135: note = L, W, F, R, or Q
  VARIANT 136: note = Y or D
  VARIANT 138: note = E, W, R, Q, F, I, L, A, P, or M
  VARIANT 139: note = A, W, G, V, or Q
  VARIANT 141: note = Q or R
  VARIANT 142: note = M, T, A, R, W, or L
  VARIANT 145: note = D or R
  VARIANT 146: note = A, E, or G
  VARIANT 148: note = A, V, or L
  VARIANT 156: note = D, W, or P
  VARIANT 157: note = E or W
  VARIANT 159: note = K or R
  VARIANT 161: note = C, V, I, L, or M
  VARIANT 163: note = D or W
  VARIANT 164: note = T or I
  VARIANT 167: note = D or Y
  VARIANT 169: note = Q or R
  VARIANT 171: note = C, A, I, or R
  VARIANT 177: note = D or E
  VARIANT 180: note = D, W, E, or H
  VARIANT 182: note = H or N
  VARIANT 183: note = S, Y, F, W, or V
  VARIANT 184: note = Q or V
  VARIANT 185: note = A, H, I, F, or R
  VARIANT 186: note = L or W
  VARIANT 187: note = S, L, I, W, E, F, Y, or Q
  VARIANT 188: note = G, I, Y, Q, R, L, or A
  VARIANT 189: note = R or K
  VARIANT 192: note = A, R, W, I, L, K, or E
  VARIANT 195: note = Q or removed
  VARIANT 196: note = N or P
  VARIANT 197: note = Q or removed
  VARIANT 198: note = G or removed
  VARIANT 199: note = N or removed
MEASPASGPRXXMXPXXFXXXFNNXXXXXKXYLXYEVXXKXXGTXVXXDQXRGXLXXQXXNXLCGFXGRHAXXXFLXXXXXLQLXPXQXXXVXXFXXWSPXXXXXXXXXXXXFXXXXXXXRXXIFXAXIXDXXPXXKXXLXXLRXXGXQVSIMTYXXFXHXWXXFVXHXGXPFQPWXGLXEXXXXXXXXLRXILQXQGN

SEQ ID NO: 197 - protein, 199 aa, synthetic construct
  VARIANT 1..12: note = One or more can be removed
  VARIANT 11: note = H or L
  VARIANT 14: note = D or Y
  VARIANT 19: note = T, I, L, or Y
  VARIANT 16: note = H or D
  VARIANT 17: note = I or T
  VARIANT 20: note = S, E, F, I, or Y
  VARIANT 25: note = G, R, K, or V
  VARIANT 26: note = I or R
  VARIANT 31: note = T, I, or W
  VARIANT 61..68: note = One or more may be removed
  VARIANT 45: note = S, W, or R
  VARIANT 47: note = K or P
  VARIANT 48: note = M, E, K, Q, S, L, D, or N
  VARIANT 51: note = H or L
  VARIANT 59: note = A or P
  VARIANT 60: note = K, G, or R
  VARIANT 62: note = L or P
  VARIANT 72: note = E or A
  VARIANT 74: note = R or L
  VARIANT 78: note = L or H
  VARIANT 80: note = P, G, R, S, or T
  VARIANT 89: note = I, H, R, or T
  VARIANT 103: note = S, R, T, or Y
  VARIANT 104: note = W or removed
  VARIANT 105: note = G or removed
  VARIANT 108: note = G, Y, C, or A
  VARIANT 109: note = E, L, or Q
  VARIANT 110: note = V or L
  VARIANT 115: note = Q, K, or Y
  VARIANT 116: note = E or L
  VARIANT 118: note = T or P
  VARIANT 123: note = R or H
  VARIANT 126: note = A, F, or C
  VARIANT 138: note = E, A, or R
  VARIANT 145: note = D or R
  VARIANT 161: note = C or M
  VARIANT 171: note = C or A
  VARIANT 180: note = D, H, or W
  VARIANT 183: note = S, F, V, or W
  VARIANT 185: note = A, I, or R
  VARIANT 188: note = G, R, I, Y, or Q
  VARIANT 189: note = R or K
  VARIANT 195..199: note = One or more may be removed
MEASPASGPRXLMXPXXFXXNFNNXXGRHKXYLCYEVERKDNGTXVXXDQXRGFLHNQXXNXLCGFYGRHAXLXFLDXVXSLQLDPAQXYRVTWFISWSPCFXWGCAXXXRAFLXXNXHVRLXIFXARIXDXXPLYKXALQMLRXAGAQVSIMTYDEFKHXWDTFVDHQGXPFQPWDGLXEHXQXLSXXLRAILQNQGN

SEQ ID NO: 198 - protein, 199 aa, synthetic construct; identical to SEQ ID NO: 196
  VARIANT 130: note = F, L, I, or Y
  VARIANT 132: note = Y or H
  VARIANT 133: note = D or W
  VARIANT 1..129: note = Same variant identities as corresponding identities in SEQ ID NO:196
  VARIANT 134..199: note = Same variant identities as corresponding identities in SEQ ID NO:196

SEQ ID NO: 199 - protein, 199 aa, synthetic construct; identical to SEQ ID NO: 197
  VARIANT 130: note = F, L, I, or Y
  VARIANT 132: note = Y or H
  VARIANT 133: note = D or W
  VARIANT 1..129: note = Same variant identities as corresponding identities in SEQ ID NO:197
  VARIANT 134..199: note = Same variant identities as corresponding identities in SEQ ID NO:197

SEQ ID NO: 200 - protein, 199 aa, synthetic construct; identical to SEQ ID NO: 196
  VARIANT 130: note = A, G, F, H, W, M, N, K, V, D, S, E, C, P, T, Y, or L
  VARIANT 132: note = R, H, K, Q, or Y
  VARIANT 133: note = W, C, D, A, G, S, T, or V
  VARIANT 1..129: note = Same variant identities as corresponding identities in SEQ ID NO:196
  VARIANT 134..199: note = Same variant identities as corresponding identities in SEQ ID NO:196

SEQ ID NO: 201 - protein, 199 aa, synthetic construct; identical to SEQ ID NO: 196
  VARIANT 130: note = A, G, F, H, W, M, N, K, V, D, S, E, C, P, or T
  VARIANT 132: note = R, H, K, or Q
  VARIANT 133: note = W or C
  VARIANT 1..129: note = Same variant identities as corresponding identities in SEQ ID NO:196
  VARIANT 134..199: note = Same variant identities as corresponding identities in SEQ ID NO:196

SEQ ID NO: 202 - protein, 199 aa, synthetic construct
  VARIANT 1..129: note = Same variant identities as corresponding identities in SEQ ID NO:196
  VARIANT 134..199: note = Same variant identities as corresponding identities in SEQ ID NO:196
MEASPASGPRXXMXPXXFXXXFNNXXXXXKXYLXYEVXXKXXGTXVXXDQXRGXLXXQXXNXLCGFXGRHAXXXFLXXXXXLQLXPXQXXXVXXFXXWSPXXXXXXXXXXXXFXXXXXXXRXXIFXAXIADHVPXXKXXLXXLRXXGXQVSIMTYXXFXHXWXXFVXHXGXPFQPWXGLXEXXXXXXXXLRXILQXQGN

SEQ ID NO: 203 - protein, 199 aa, synthetic construct
  VARIANT 132: note = R, H, or K
  VARIANT 133: note = A, G, S, or T
  VARIANT 1..129: note = Same variant identities as corresponding identities in SEQ ID NO:196
  VARIANT 134..199: note = Same variant identities as corresponding identities in SEQ ID NO:196
MEASPASGPRXXMXPXXFXXXFNNXXXXXKXYLXYEVXXKXXGTXVXXDQXRGXLXXQXXNXLCGFXGRHAXXXFLXXXXXLQLXPXQXXXVXXFXXWSPXXXXXXXXXXXXFXXXXXXXRXXIFXAXIDDXXPXXKXXLXXLRXXGXQVSIMTYXXFXHXWXXFVXHXGXPFQPWXGLXEXXXXXXXXLRXILQXQGN

SEQ ID NO: 204 - protein, 199 aa, synthetic construct; identical to SEQ ID NO: 197
  VARIANT 130: note = A, G, F, H, W, M, N, K, V, D, S, E, C, P, T, Y, or L
  VARIANT 132: note = R, H, K, Q, or Y
  VARIANT 133: note = W, C, D, A, G, S, T, or V
  VARIANT 1..129: note = Same variant identities as corresponding identities in SEQ ID NO:197
  VARIANT 134..199: note = Same variant identities as corresponding identities in SEQ ID NO:197

SEQ ID NO: 205 - protein, 199 aa, synthetic construct; identical to SEQ ID NO: 197
  VARIANT 130: note = A, G, F, H, W, M, N, K, V, D, S, E, C, P, or T
  VARIANT 132: note = R, H, K, or Q
  VARIANT 133: note = W or C
  VARIANT 1..129: note = Same variant identities as corresponding identities in SEQ ID NO:197
  VARIANT 134..199: note = Same variant identities as corresponding identities in SEQ ID NO:197

SEQ ID NO: 206 - protein, 199 aa, synthetic construct
  VARIANT 1..129: note = Same variant identities as corresponding identities in SEQ ID NO:197
  VARIANT 134..199: note = Same variant identities as corresponding identities in SEQ ID NO:197
MEASPASGPRXLMXPXXFXXNFNNXXGRHKXYLCYEVERKDNGTXVXXDQXRGFLHNQXXNXLCGFYGRHAXLXFLDXVXSLQLDPAQXYRVTWFISWSPCFXWGCAXXXRAFLXXNXHVRLXIFXARIADHVPLYKXALQMLRXAGAQVSIMTYDEFKHXWDTFVDHQGXPFQPWDGLXEHXQXLSXXLRAILQNQGN

SEQ ID NO: 207 - protein, 199 aa, synthetic construct
  VARIANT 132: note = R, H, or K
  VARIANT 133: note = A, G, S, or T
  VARIANT 1..129: note = Same variant identities as corresponding identities in SEQ ID NO:197
  VARIANT 134..199: note = Same variant identities as corresponding identities in SEQ ID NO:197
MEASPASGPRXLMXPXXFXXNFNNXXGRHKXYLCYEVERKDNGTXVXXDQXRGFLHNQXXNXLCGFYGRHAXLXFLDXVXSLQLDPAQXYRVTWFISWSPCFXWGCAXXXRAFLXXNXHVRLXIFXARIDDXXPLYKXALQMLRXAGAQVSIMTYDEFKHXWDTFVDHQGXPFQPWDGLXEHXQXLSXXLRAILQNQGN

SEQ ID NO: 208 - protein, 199 aa, synthetic construct; identical to SEQ ID NO: 196
  VARIANT 130: note = Y, A, G, F, H, W, M, N, K, V, D, S, E, C, P, or T
  VARIANT 132: note = Y, R, H, K, or Q
  VARIANT 133: note = D, W, or C
  VARIANT 1..129: note = Same variant identities as corresponding identities in SEQ ID NO:196
  VARIANT 134..199: note = Same variant identities as corresponding identities in SEQ ID NO:196

SEQ ID NO: 209 - protein, 199 aa, synthetic construct
  VARIANT 1..129: note = Same variant identities as corresponding identities in SEQ ID NO:196
  VARIANT 134..199: note = Same variant identities as corresponding identities in SEQ ID NO:196
MEASPASGPRXXMXPXXFXXXFNNXXXXXKXYLXYEVXXKXXGTXVXXDQXRGXLXXQXXNXLCGFXGRHAXXXFLXXXXXLQLXPXQXXXVXXFXXWSPXXXXXXXXXXXXFXXXXXXXRXXIFXAXIYDYDPXXKXXLXXLRXXGXQVSIMTYXXFXHXWXXFVXHXGXPFQPWXGLXEXXXXXXXXLRXILQXQGN

SEQ ID NO: 210 - protein, 199 aa, synthetic construct; identical to SEQ ID NO: 197
  VARIANT 130: note = Y, A, G, F, H, W, M, N, K, V, D, S, E, C, P, or T
  VARIANT 132: note = Y, R, H, K, or Q
  VARIANT 133: note = D, W, or C
  VARIANT 1..129: note = Same variant identities as corresponding identities in SEQ ID NO:197
  VARIANT 134..199: note = Same variant identities as corresponding identities in SEQ ID NO:197

SEQ ID NO: 211 - protein, 199 aa, synthetic construct
  VARIANT 1..129: note = Same variant identities as corresponding identities in SEQ ID NO:197
  VARIANT 134..199: note = Same variant identities as corresponding identities in SEQ ID NO:197
MEASPASGPRXLMXPXXFXXNFNNXXGRHKXYLCYEVERKDNGTXVXXDQXRGFLHNQXXNXLCGFYGRHAXLXFLDXVXSLQLDPAQXYRVTWFISWSPCFXWGCAXXXRAFLXXNXHVRLXIFXARIYDYDPLYKXALQMLRXAGAQVSIMTYDEFKHXWDTFVDHQGXPFQPWDGLXEHXQXLSXXLRAILQNQGN

SEQ ID NO: 212 - protein, 15 aa, synthetic construct
GLNDIFEAQKIEWHE

SEQ ID NO: 213 - protein, 437 aa, synthetic construct
MEASPASGPRHLMDPHIFTSNFNNGIGRHKTYLCYEVERLDNGTSVKMDQHRGFLHNQAKNLLCGFYGRHAALLFLDLVPSLQLDPAQIYRVTWFISWSPCFSWGCAGEVRAFLQENTHVRLRIFAARIADHWPLYKEALQMLRDAGAQVSIMTYDEFKHCWDTFVDHQGCPFQPWDGLDEHSQALSGRLRAILQNQGNSGGSSGGSSGSETPGTSESATPESSGGSSGGSEASPASGPRHLMDPHIFTSNFNNGIGRHKTYLCYEVERLDNGTSVKMDQHRGFLHNQAKNLLCGFYGRHAELLFLDLVPSLQLDPAQIYRVTWFISWSPCFSWGCAGEVRAFLQENTHVRLRIFAARIADHWPLYKEALQMLRDAGAQVSIMTYDEFKHCWDTFVDHQGCPFQPWDGLDEHSQALSGRLRAILQNQGNLEHHHHHH

SEQ ID NO: 214 - protein, 437 aa, synthetic construct
MEASPASGPRHLMDPHIFTSNFNNGIGRHKTYLCYEVERLDNGTSVKMDQHRGFLHNQAKNLLCGFYGRHAELLFLDLVPSLQLDPAQIYRVTWFISWSPCFSWGCAGEVRAFLQENTHVRLRIFAARIADHWPLYKEALQMLRDAGAQVSIMTYDEFKHCWDTFVDHQGCPFQPWDGLDEHSQALSGRLRAILQNQGNSGGSSGGSSGSETPGTSESATPESSGGSSGGSEASPASGPRHLMDPHIFTSNFNNGIGRHKTYLCYEVERLDNGTSVKMDQHRGFLHNQAKNLLCGFYGRHAALLFLDLVPSLQLDPAQIYRVTWFISWSPCFSWGCAGEVRAFLQENTHVRLRIFAARIADHWPLYKEALQMLRDAGAQVSIMTYDEFKHCWDTFVDHQGCPFQPWDGLDEHSQALSGRLRAILQNQGNLEHHHHHH

SEQ ID NO: 215 - protein, 199 aa, synthetic construct
MEASPASGPRHLMDPHIFYSNFNNGIGRHKTYLCYEVERLDNGTSVKMDQHRGFLHNQAKNLLCGFYGRHAELLFLDLVPSLQLDPAQIYRVTWFISWSPCFSWGCAGEVRAFLQENTHVRLRIFAARIADHVPLYKEALQMLRDAGAQVSIMTYDEFKHCWDTFVDHQGCPFQPWDGLDEHSQALSGRLRAILQNQGN

SEQ ID NO: 216 - protein, 199 aa, synthetic construct; identical to SEQ ID NO: 196
  VARIANT 130: note = Y, A, F, L, or W
  VARIANT 132: note = Y or H
  VARIANT 133: note = D or W
  VARIANT 1..129: note = Same variant identities as corresponding identities in SEQ ID NO:196
  VARIANT 134..199: note = Same variant identities as corresponding identities in SEQ ID NO:196

SEQ ID NO: 217 - protein, 199 aa, synthetic construct; identical to SEQ ID NO: 197
  VARIANT 130: note = Y, A, F, L or W
  VARIANT 132: note = Y or H
  VARIANT 133: note = D or W
  VARIANT 1..129: note = Same variant identities as corresponding identities in SEQ ID NO:197
  VARIANT 134..199: note = Same variant identities as corresponding identities in SEQ ID NO:197

SEQ ID NO: 218 - protein, 8 aa, synthetic construct
DYKDDDDK

SEQ ID NO: 219 - protein, 5 aa, synthetic construct
GGSGG

SEQ ID NO: 220 - protein, 6 aa, synthetic construct
HHHHHH

SEQ ID NO: 221 - protein, 429 aa, synthetic construct
MEASPASGPRHLMDPHIFYSNFNNGIGRHKTYLCYEVERLDNGTSVKMDQHRGFLHNQAKNLLCGFYGRHAALLFLDLVPSLQLDPAQIYRVTWFISWSPCFSWGCAGEVRAFLQENTHVRLRIFAARIADHWPLYKEALQMLRDAGAQVSIMTYDEFKHCWDTFVDHQGAPFQPWDGLDEHSQALSGRLRAILQNQGNSGGSSGGSSGSETPGTSESATPESSGGSSGGSEASPASGPRHLMDPHIFYSNFNNGIGRHKTYLCYEVERLDNGTSVKMDQHRGFLHNQAKNLLCGFYGRHAALLFLDLVPSLQLDPAQIYRVTWFISWSPCFSWGCAGEVRAFLQENTHVRLRIFAARIADHWPLYKEALQMLRDAGAQVSIMTYDEFKHCWDTFVDHQGAPFQPWDGLDEHSQALSGRLRAILQNQGN

SEQ ID NO: 222 - protein, 429 aa, synthetic construct
MEASPASGPRHLMDPHTFYSNFNNRIGRHKTYLCYEVERLDNGTSVKMDQHRGFLHNQAKNLLCGFYGRHAELLFLDLVPSLQLDPAQIYRVTWFISWSPCFSWGCAGEVRAFLQENTHVRLRIFAARIADHWPLYKEALQMLRDAGAQVSIMTYDEFKHCWDTFVDHQGAPFQPWDGLDEHSQALSGRLRAILQNQGNSGGSSGGSSGSETPGTSESATPESSGGSSGGSEASPASGPRHLMDPHTFYSNFNNRIGRHKTYLCYEVERLDNGTSVKMDQHRGFLHNQAKNLLCGFYGRHAELLFLDLVPSLQLDPAQIYRVTWFISWSPCFSWGCAGEVRAFLQENTHVRLRIFAARIADHWPLYKEALQMLRDAGAQVSIMTYDEFKHCWDTFVDHQGAPFQPWDGLDEHSQALSGRLRAILQNQGN

SEQ ID NO: 223 - protein, 61 aa, synthetic construct
MEASPASGPRHLMDPHTFYSNFNNRIGRHKTYLCYEVERLDNGTSVKMDQHRGFLHNQAKN

SEQ ID NO: 224 - protein, 61 aa, synthetic construct
MEASPASGPRHLMDPHIFYSNFNNKIGRHKTYLCYEVERLDNGTWVKMDQHRGFLHNQAKN

SEQ ID NO: 225 - protein, 413 aa, synthetic construct
MEASPASGPRHLMDPHTFYSNFNNKIGRHKTYLCYEVERLDNGTWVKMDQHRGFLHNQPRRHAELLFLDLVPSLQLDPAQIYRVTWFISWSPCFSWGCACEVRAFLQENTHVRLRIFAARIADHWPLYKEALQMLRDAGAQVSIMTYDEFKHCWDTFVDHQGAPFQPWDGLDEHSQALSRRLRAILQNQGNSGGSSGGSSGSETPGTSESATPESSGGSSGGSEASPASGPRHLMDPHTFYSNFNNKIGRHKTYLCYEVERLDNGTWVKMDQHRGFLHNQPRRHAELLFLDLVPSLQLDPAQIYRVTWFISWSPCFSWGCACEVRAFLQENTHVRLRIFAARIADHWPLYKEALQMLRDAGAQVSIMTYDEFKHCWDTFVDHQGAPFQPWDGLDEHSQALSRRLRAILQNQGN

SEQ ID NO: 226 - protein, 13 aa, synthetic construct
AHIVMVDAYKPTK

SEQ ID NO: 227 - protein, 116 aa, synthetic construct
GAMVDTLSGLSSEQGQSGDMTIEEDSATHIKFSKRDEDGKELAGATMELRDSSGKTISTWISDGQVKDFYLYPGKYTFVETAAPDGYEVATAITFTVNEQGQVTVNGKATKGDAHI

SEQ ID NO: 228 - protein, 12 aa, synthetic construct
KLGDIEFIKVNK

SEQ ID NO: 229 - protein, 112 aa, synthetic construct
KPLRGAVFSLQKQHPDYPDIYGAIDQNGTYQNVRTGEDGKLTFKNLSDGKYRLFENSEPAGYKPVQNKPIVAFQIVNGEVRDVTSIVPQDIPATYEFTNGKHYITNEPIPPK

SEQ ID NO: 230 - protein, 214 aa, synthetic construct
MSKGEELFTGVVPILVELDGDVNGHKFSVRGEGEGDATIGKLTLKFICTTGKLPVPWPTLVTTLTYGVQCFSRYPDHMKRHDFFKSAMPEGYVQERTISFKDDGKYKTRAVVKFEGDTLVNRIELKGTDFKEDGNILGHKLEYNFNSHNVYITADKQKNGIKANFTVRHNVEDGSVQLADHYQQNTPIGDGPVLLPDNHYLSTQTVLSKDPNEK

SEQ ID NO: 231 - protein, 16 aa, synthetic construct
RDHMVLHEYVNAAGIT

SEQ ID NO: 232 - protein, 165 aa, synthetic construct
MVFTLEDFVGDWEQTAAYNLDQVLEQGGVSSLLQNLAVSVTPIQRIVRSGENALKIDIHVIIPYEGLSADQMAQIEEVFKVVYPVDDHHFKVILPYGTLVIDGVTPNMLNYFGRPYEGIAVFDGKKITVTGTLWNGNKIIDERLITPDGSMLFRVTINSHHHHHH

SEQ ID NO: 233 - protein, 11 aa, synthetic construct
VSGWRLFKKIS

SEQ ID NO: 234 - protein, 33 aa, synthetic construct
HMKQLEDKVEELLSKNYHLENEVARLKKLVGER

SEQ ID NO: 235 - protein, 10 aa, synthetic construct
GSPGSSSSGS

SEQ ID NO: 236 - protein, 16 aa, synthetic construct
DPGGGGSGGGGSNPGS

SEQ ID NO: 237 - protein, 16 aa, synthetic construct
GGGGSGGGGSGSDPGS

SEQ ID NO: 238 - protein, 16 aa, synthetic construct
DPGSGGGGSGGGGSGS

SEQ ID NO: 239 - protein, 19 aa, synthetic construct
GGGGSGGGGSGGGGSDPGS

SEQ ID NO: 240 - protein, 19 aa, synthetic construct
DPGSGGGGSGGGGSGGGGS

SEQ ID NO: 241 - protein, 17 aa, synthetic construct
DPGSGSVPLGSGSNPGS

SEQ ID NO: 242 - protein, 19 aa, synthetic construct
DPGSGGSVPLGSGGSNPGS

SEQ ID NO: 243 - protein, 20 aa, synthetic construct
DPGVLEREDKPTTSKPNPGS

SEQ ID NO: 244 - protein, 20 aa, synthetic construct
DPGVLEREDVPTTSYPNPGS

SEQ ID NO: 245 - protein, 20 aa, synthetic construct
DPGVLEREDKVTTSKYNPGS

SEQ ID NO: 246 - protein, 18 aa, synthetic construct
DPVLEREDKVTTSKNPGS

SEQ ID NO: 247 - protein, 7 aa, synthetic construct
DIEGRMD

SEQ ID NO: 248 - protein, 15 aa, synthetic construct
GEGKSSGSGSESKAS

SEQ ID NO: 249 - protein, 18 aa, synthetic construct
GSTSGSGKPGSGEGSTKG

SEQ ID NO: 250 - protein, 10 aa, synthetic construct
SGGGGSGGGG

SEQ ID NO: 251 - protein, 14 aa, synthetic construct
GGGGSGGGGSGGGG

SEQ ID NO: 252 - protein, 11 aa, synthetic construct
AEAAAKEAAAK

SEQ ID NO: 253 - protein, 20 aa, synthetic construct
GGGGSGGGGSGGGGSGGGGS

SEQ ID NO: 254 - protein, 8 aa, synthetic construct
GSGSGNGS

SEQ ID NO: 255 - protein, 8 aa, synthetic construct
GGSGSGSG

SEQ ID NO: 256 - protein, 6 aa, synthetic construct
GGSGSG

SEQ ID NO: 257 - protein, 8 aa, synthetic construct
GGSGNGSG

SEQ ID NO: 258 - protein, 8 aa, synthetic construct
GGNGSGSG

SEQ ID NO: 259 - protein, 57 aa, synthetic construct
GGNGSGAEAAAKEAAAKEAAAKEAAAKALEAEAAAKEAAAKEAAAKEAAAKAEAAAK

SEQ ID NO: 260 - protein, 6 aa, synthetic construct
GGSGGS

SEQ ID NO: 261 - protein, 5 aa, synthetic construct
GGGGS

SEQ ID NO: 262 - protein, 5 aa, synthetic construct
SGGGG

SEQ ID NO: 263 - protein, 9 aa, synthetic construct
GGGGSGGGG

SEQ ID NO: 264 - protein, 13 aa, synthetic construct
EGKSSGSGESKST

SEQ ID NO: 265 - protein, 15 aa, synthetic construct
GLNDIFEAQKIEWHE

SEQ ID NO: 266 - protein, 33 aa, synthetic construct
DSGGSSGGSSGSETPGTSESATPESSGGSSGGS

SEQ ID NO: 267 - protein, 10 aa, synthetic construct
GGGGSGGGGS

SEQ ID NO: 268 - protein, 18 aa, synthetic construct
KESGSVSSEQLAQFRSLD

SEQ ID NO: 269 - protein, 12 aa, synthetic construct
GSAGSAAGSGEF

SEQ ID NO: 270 - protein, 5 aa, synthetic construct
EAAAK

SEQ ID NO: 271 - protein, 199 aa, synthetic construct
MEASPASGPRHLMDPHIFTSNFNNGIGRHKTYLCYEVERLDNGTSVKMDQHRGFLHNQAKNLLCGFYGRHAELRFLDLVPSLQLDPAQIYRVTWFISWSPCFSWGCAGEVRAFLQENTHVRLRIFAARIADHVPLYKEALQMLRDAGAQVSIMTYDEFKHCWDTFVDHQGAPFQPWDGLDEHSQALSGRLRAILQNQGN

SEQ ID NO: 272 - protein, 199 aa, synthetic construct
MEASPASGPRHLMDPHIFTSNFNNGIGRHKTYLCYEVERLDNGTSVKMDQHRGFLHNQAKNLLCGFYGRHAELRFLDLVPSLQLDPAQIYRVTWFISWSPCFSWGCAGEVRAFLQENTHVRLRIFAARIADHVPLYKEALQMLRDAGAQVSIMTYDEFKHCWDTFVDHQGCPFQPWDGLDEHSQALSGRLRAILQNQGN

SEQ ID NO: 273 - protein, 199 aa, synthetic construct
MEASPASGPRHLMDPHIFTSNFNNGIGRHKTYLCYEVERLDNGTSVKMDQHRGFLHNQAKNLLCGFYGRHAELLFLDLVPSLQLDPAQIYRVTWFISWSPCFSWGCAGEVRAFLQENTHVRLRIFAARIADHVPLYKEALQMLRDAGAQVSIMTYDEFKHCWDTFVDHQGCPFQPWDGLDEHSQALSGRLRAILQNQGN

SEQ ID NO: 274 - protein, 199 aa, synthetic construct; identical to SEQ ID NO: 215

SEQ ID NO: 275 - protein, 199 aa, synthetic construct
MEASPASGPRHLMDPHIFYSNFNNGIGRHKTYLCYEVERLDNGTSVKMDQHRGFLHNQAKNLLCGFYGRHAELLFLDLVPSLQLDPAQIYRVTWFISWSPCFSWGCAGEVRAFLQENTHVRLRIFAARIADHVPLYKEALQMLRDAGAQVSIMTYDEFKHCWDTFVDHQGAPFQPWDGLDEHSQALSGRLRAILQNQGN

SEQ ID NO: 276 - protein, 199 aa, synthetic construct
MEASPASGPRHLMDPHTFYSNFNNRIGRHKTYLCYEVERLDNGTSVKMDQHRGFLHNQAKNLLCGFYGRHAELLFLDLVPSLQLDPAQIYRVTWFISWSPCFSWGCAGEVRAFLQENTHVRLRIFAARIADHVPLYKEALQMLRDAGAQVSIMTYDEFKHCWDTFVDHQGAPFQPWDGLDEHSQALSGRLRAILQNQGN

SEQ ID NO: 277 - protein, 199 aa, synthetic construct; identical to SEQ ID NO: 276

SEQ ID NO: 278 - protein, 191 aa, synthetic construct
MEASPASGPRHLMDPHTFYSNFNNKIGRHKTYLCYEVERLDNGTWVKMDQHRGFLHNQPRRHAELLFLDLVPSLQLDPAQIYRVTWFISWSPCFSWGCACEVRAFLQENTHVRLRIFAARIADHVPLYKEALQMLRDAGAQVSIMTYDEFKHCWDTFVDHQGAPFQPWDGLDEHSQALSRRLRAILQNQGN

SEQ ID NO: 279 - protein, 191 aa, synthetic construct; identical to SEQ ID NO: 119

SEQ ID NO: 280 - protein, 189 aa, synthetic construct
MEASPASGPRHLMDPHTFYSNFNNKIGRHKTYLCYEVERLDNGTWVKMDQHRGFLHNQPRRHAELLFLDLVPSLQLDPAQIYRVTWFISWSPCFSCACEVRAFLQENTHVRLRIFAARIADHVPLYKEALQMLRDAGAQVSIMTYDEFKHCWDTFVDHQGAPFQPWDGLDEHSQALSRRLRAILQNQGN

SEQ ID NO: 281 - protein, 191 aa, synthetic construct
  VARIANT 121: note = A, G, F, H, Q, M, N, K, V, D, E, S, C, P, or T
  VARIANT 123: note = R, H, L, or Q
MEASPASGPRHLMDPHTFYSNFNNKIGRHKTYLCYEVERLDNGTWVKMDQHRGFLHNQPRRHAELLFLDLVPSLQLDPAQIYRVTWFISWSPCFSWGCACEVRAFLQENTHVRLRIFAARIXDXWPLYKEALQMLRDAGAQVSIMTYDEFKHCWDTFVDHQGAPFQPWDGLDEHSQALSRRLRAILQNQGN

SEQ ID NO: 282 - protein, 191 aa, synthetic construct
  VARIANT 121: note = A or S
MEASPASGPRHLMDPHTFYSNFNNKIGRHKTYLCYEVERLDNGTWVKMDQHRGFLHNQPRRHAELLFLDLVPSLQLDPAQIYRVTWFISWSPCFSWGCACEVRAFLQENTHVRLRIFAARIXDHWPLYKEALQMLRDAGAQVSIMTYDEFKHCWDTFVDHQGAPFQPWDGLDEHSQALSRRLRAILQNQGN

SEQ ID NO: 283 - protein, 191 aa, synthetic construct
  VARIANT 121: note = A, G, F, H, Q, M, N, K, V, D, E, S, C, P, or T
  VARIANT 123: note = R, H, L, or Q
MEASPASGPRHLMDPHTFYSNFNNKIGRHKTYLCYEVERLDNGTWVKMDQHRGFLHNQPRRHAALLFLDLVPSLQLDPAQIYRVTWFISWSPCFSWGCACEVRAFLQENTHVRLRIFAARIXDXWPLYKEALQMLRDAGAQVSIMTYDEFKHCWDTFVDHQGAPFQPWDGLDEHSQALSRRLRAILQNQGN

SEQ ID NO: 284 - protein, 191 aa, synthetic construct
  VARIANT 121: note = A or S
MEASPASGPRHLMDPHTFYSNFNNKIGRHKTYLCYEVERLDNGTWVKMDQHRGFLHNQPRRHAALLFLDLVPSLQLDPAQIYRVTWFISWSPCFSWGCACEVRAFLQENTHVRLRIFAARIXDHWPLYKEALQMLRDAGAQVSIMTYDEFKHCWDTFVDHQGAPFQPWDGLDEHSQALSRRLRAILQNQGN

SEQ ID NO: 285-299 - skipped (15 entries)

SEQ ID NO: 300 - protein, 207 aa, synthetic construct
MEASPASGPRHLMDPHIFTSNFNNGIGRHKTYLCYEVERLDNGTSVKMDQHRGFLHNQAKNLLCGFYGRHAQLRFLDLVPSLQLDPAQIYRVTWFISWSPCFSWGCAGEVRAFLQENTHVRLRIFAARIADYDPLYKEALQMLRDAGAQVSIMTYDEFKHCWDTFVDHQGAPFQPWDGLDEHSQALSGRLRAILQNQGNLEHHHHHH

SEQ ID NO: 301 - protein, 207 aa, synthetic construct
MEASPASGPRHLMDPHIFTSNFNNGIGRHKTYLCYEVERLDNGTSVKMDQHRGFLHNQAKNLLCGFYGRHAQLRFLDLVPSLQLDPAQIYRVTWFISWSPCFSWGCAGEVRAFLQENTHVRLRIFAARIADHDPLYKEALQMLRDAGAQVSIMTYDEFKHCWDTFVDHQGAPFQPWDGLDEHSQALSGRLRAILQNQGNLEHHHHHH

SEQ ID NO: 302 - protein, 207 aa, synthetic construct
MEASPASGPRHLMDPHIFTSNFNNGIGRHKTYLCYEVERLDNGTSVKMDQHRGFLHNQAKNLLCGFYGRHAALRFLDLVPSLQLDPAQIYRVTWFISWSPCFSWGCAGEVRAFLQENTHVRLRIFAARIADYDPLYKEALQMLRDAGAQVSIMTYDEFKHCWDTFVDHQGAPFQPWDGLDEHSQALSGRLRAILQNQGNLEHHHHHH

SEQ ID NO: 303 - protein, 207 aa, synthetic construct
MEASPASGPRHLMDPHIFTSNFNNGIGRHKTYLCYEVERLDNGTSVKMDQHRGFLHNQAKNLLCGFYGRHAALRFLDLVPSLQLDPAQIYRVTWFISWSPCFSWGCAGEVRAFLQENTHVRLRIFAARIADHDPLYKEALQMLRDAGAQVSIMTYDEFKHCWDTFVDHQGAPFQPWDGLDEHSQALSGRLRAILQNQGNLEHHHHHH

SEQ ID NO: 304 - protein, 207 aa, synthetic construct
MEASPASGPRHLMDPHIFTSNFNNGIGRHKTYLCYEVERLDNGTSVKMDQHRGFLHNQAKNLLCGFYGRHAQLRFLDLVPSLQLDPAQIYRVTWFISWSPCFSWGCAGEVRAFLQENTHVRLRIFAARIYDYDPLYKEALQMLRDAGAQVSIMTYDEFKHCWDTFVDHQGAPFQPWDGLDEHSQALSGRLRAILQNQGNLEHHHHHH

SEQ ID NO: 305 - protein, 207 aa, synthetic construct
MEASPASGPRHLMDPHIFTSNFNNGIGRHKTYLCYEVERLDNGTSVKMDQHRGFLHNQAKNLLCGFYGRHAALRFLDLVPSLQLDPAQIYRVTWFISWSPCFSWGCAGEVRAFLQENTHVRLRIFAARIYDYDPLYKEALQMLRDAGAQVSIMTYDEFKHCWDTFVDHQGAPFQPWDGLDEHSQALSGRLRAILQNQGNLEHHHHHH

SEQ ID NO: 306 - protein, 199 aa, synthetic construct
MEASPASGPRHLMDPHIFYSNFNNGIGRHKTYLCYEVERLDNGTSVKMDQHRGFLHNQAKNLLCGFYGRHAELLFLDLVPSLQLDPAQIYRVTWFISWSPCFSWGTAGEVRAFLQENTHVRLRIFAARIADHWPLYKEALQMLRDAGAQVSIMTYDEFKHCWDTFVDHQGAPFQPWDGLDEHSQALSGRLRAILQNQGN

SEQ ID NO: 307 - skipped

SEQ ID NO: 308 - protein, 199 aa, synthetic construct
MEASPASGPRHLMDPHIFTSNFNNGIGRHKTYLCYEVERLDNGTSVKMDQHRGFLHNQAKNLLCGFYGRHAALRFLDLVPSLQLDPAQIYRVTWFISWSPCFSWGCAGEVRAFLQENTHVRLRIFAARIADEWPLYKEALQMLRDAGAQVSIMTYDEFKHCWDTFVDHQGCPFQPWDGLDEHSQALSGRLRAILQNQGN

SEQ ID NO: 309 - protein, 191 aa, synthetic construct
MEASPASGPRHLMDPHTFYSNFNNKIGRHKTYLCYEVERLDNGTWVKMDQHRGFLHNQPRRHAELLFLDLVPSLQLDPAQIYRVTWFISWSPCFSWGKACEVRAFLQENTHVRLRIFAARIADHWPLYKEALQMLRDAGAQVSIMTYDEFKHCWDTFVDHQGAPFQPWDGLDEHSQALSRRLRAILQNQGN

SEQ ID NO: 310 - protein, 207 aa, synthetic construct
MEASPASGPRHLMDPHIFTSNFNNGIGRHKTYLCYEVERLDNGTSVKMDQHRGFLHNQAKNLLCGFYGRHAELRFLDLVPSLQLDPAQIYRVTWFISWSPCFSWGCAGEVRAFLQENTHVRLRIFAARIYDPDPLYKEALQMLRDAGAQVSIMTYDEFKHCWDTFVDHQGCPFQPWDGLDEHSQALSGRLRAILQNQGNLEHHHHHH

SEQ ID NO: 311 - protein, 207 aa, synthetic construct
MEASPASGPRHLMDPHIFTSNFNNGIGRHKTYLCYEVERLDNGTSVKMDQHRGFLHNQAKNLLCGFYGRHAELRFLDLVPSLQLDPAQIYRVTWFISWSPCFSWGCAGEVRAFLQENTHVRLRIFAARIADPWPLYKEALQMLRDAGAQVSIMTYDEFKHCWDTFVDHQGCPFQPWDGLDEHSQALSGRLRAILQNQGNLEHHHHHH

SEQ ID NO: 312 - protein, 207 aa, synthetic construct
MEASPASGPRHLMDPHIFTSNFNNGIGRHKTYLCYEVERLDNGTSVKMDQHRGFLHNQAKNLLCGFYGRHAELRFLDLVPSLQLDPAQIYRVTWFISWSPCFSWGCAGEVRAFLQENTHVRLRIFAARIYDPWPLYKEALQMLRDAGAQVSIMTYDEFKHCWDTFVDHQGCPFQPWDGLDEHSQALSGRLRAILQNQGNLEHHHHHH

SEQ ID NO: 313 - protein, 207 aa, synthetic construct
MEASPASGPRHLMDPHIFTSNFNNGIGRHKTYLCYEVERLDNGTSVKMDQHRGFLHNQAKNLLCGFYGRHAELRFLDLVPSLQLDPAQIYRVTWFISWSPCFSWGCAGEVRAFLQENTHVRLRIFAARILDHWPLYKEALQMLRDAGAQVSIMTYDEFKHCWDTFVDHQGCPFQPWDGLDEHSQALSGRLRAILQNQGNLEHHHHHH

SEQ ID NO: 314 - protein, 207 aa, synthetic construct
MEASPASGPRHLMDPHIFTSNFNNGIGRHKTYLCYEVERLDNGTSVKMDQHRGFLHNQAKNLLCGFYGRHAELLFLDLVPSLQLDPAQIYRVTWFISWSPCFSWGCAGEVRAFLQENTHVRLRIFAARILDHATLYKEALQMLRDAGAQVSIMTYDEFKHCWDTFVDHQGCPFQPWDGLDEHSQALSGRLRAILQNQGNLEHHHHHH

SEQ ID NO: 315 - protein, 207 aa, synthetic construct
MEASPASGPRHLMDPHIFTSNFNNGIGRHKTYLCYEVERLDNGTSVKMDQHRGFLHNQAKNLLCGFYGRHAELLFLDLVPSLQLDPAQIYRVTWFISWSPCFSWGCAGEVRAFLQENTHVRLRIFAARILDHCTLYKEALQMLRDAGAQVSIMTYDEFKHCWDTFVDHQGCPFQPWDGLDEHSQALSGRLRAILQNQGNLEHHHHHH

SEQ ID NO: 316 - protein, 207 aa, synthetic construct
MEASPASGPRHLMDPHIFTSNFNNGIGRHKTYLCYEVERLDNGTSVKMDQHRGFLHNQAKNLLCGFYGRHAELLFLDLVPSLQLDPAQIYRVTWFISWSPCFSWGCAGEVRAFLQENTHVRLRIFAARILDHDTLYKEALQMLRDAGAQVSIMTYDEFKHCWDTFVDHQGCPFQPWDGLDEHSQALSGRLRAILQNQGNLEHHHHHH

SEQ ID NO: 317 - protein, 207 aa, synthetic construct
MEASPASGPRHLMDPHIFTSNFNNGIGRHKTYLCYEVERLDNGTSVKMDQHRGFLHNQAKNLLCGFYGRHAELLFLDLVPSLQLDPAQIYRVTWFISWSPCFSWGCAGEVRAFLQENTHVRLRIFAARILDHETLYKEALQMLRDAGAQVSIMTYDEFKHCWDTFVDHQGCPFQPWDGLDEHSQALSGRLRAILQNQGNLEHHHHHH

SEQ ID NO: 318 - protein, 207 aa, synthetic construct
MEASPASGPRHLMDPHIFTSNFNNGIGRHKTYLCYEVERLDNGTSVKMDQHRGFLHNQAKNLLCGFYGRHAELLFLDLVPSLQLDPAQIYRVTWFISWSPCFSWGCAGEVRAFLQENTHVRLRIFAARILDHFTLYKEALQMLRDAGAQVSIMTYDEFKHCWDTFVDHQGCPFQPWDGLDEHSQALSGRLRAILQNQGNLEHHHHHH

SEQ ID NO: 319 - protein, 207 aa, synthetic construct
MEASPASGPRHLMDPHIFTSNFNNGIGRHKTYLCYEVERLDNGTSVKMDQHRGFLHNQAKNLLCGFYGRHAELLFLDLVPSLQLDPAQIYRVTWFISWSPCFSWGCAGEVRAFLQENTHVRLRIFAARILDHGTLYKEALQMLRDAGAQVSIMTYDEFKHCWDTFVDHQGCPFQPWDGLDEHSQALSGRLRAILQNQGNLEHHHHHH

SEQ ID NO: 320 - protein, 207 aa, synthetic construct
MEASPASGPRHLMDPHIFTSNFNNGIGRHKTYLCYEVERLDNGTSVKMDQHRGFLHNQAKNLLCGFYGRHAELLFLDLVPSLQLDPAQIYRVTWFISWSPCFSWGCAGEVRAFLQENTHVRLRIFAARILDHHTLYKEALQMLRDAGAQVSIMTYDEFKHCWDTFVDHQGCPFQPWDGLDEHSQALSGRLRAILQNQGNLEHHHHHH

SEQ ID NO: 321 - protein, 207 aa, synthetic construct
MEASPASGPRHLMDPHIFTSNFNNGIGRHKTYLCYEVERLDNGTSVKMDQHRGFLHNQAKNLLCGFYGRHAELLFLDLVPSLQLDPAQIYRVTWFISWSPCFSWGCAGEVRAFLQENTHVRLRIFAARILDHITLYKEALQMLRDAGAQVSIMTYDEFKHCWDTFVDHQGCPFQPWDGLDEHSQALSGRLRAILQNQGNLEHHHHHH

SEQ ID NO: 322 - protein, 207 aa, synthetic construct
MEASPASGPRHLMDPHIFTSNFNNGIGRHKTYLCYEVERLDNGTSVKMDQHRGFLHNQAKNLLCGFYGRHAELLFLDLVPSLQLDPAQIYRVTWFISWSPCFSWGCAGEVRAFLQENTHVRLRIFAARILDHKTLYKEALQMLRDAGAQVSIMTYDEFKHCWDTFVDHQGCPFQPWDGLDEHSQALSGRLRAILQNQGNLEHHHHHH

SEQ ID NO: 323 - protein, 207 aa, synthetic construct
MEASPASGPRHLMDPHIFTSNFNNGIGRHKTYLCYEVERLDNGTSVKMDQHRGFLHNQAKNLLCGFYGRHAELLFLDLVPSLQLDPAQIYRVTWFISWSPCFSWGCAGEVRAFLQENTHVRLRIFAARILDHLTLYKEALQMLRDAGAQVSIMTYDEFKHCWDTFVDHQGCPFQPWDGLDEHSQALSGRLRAILQNQGNLEHHHHHH

SEQ ID NO: 324 - protein, 207 aa, synthetic construct
MEASPASGPRHLMDPHIFTSNFNNGIGRHKTYLCYEVERLDNGTSVKMDQHRGFLHNQAKNLLCGFYGRHAELLFLDLVPSLQLDPAQIYRVTWFISWSPCFSWGCAGEVRAFLQENTHVRLRIFAARILDHMTLYKEALQMLRDAGAQVSIMTYDEFKHCWDTFVDHQGCPFQPWDGLDEHSQALSGRLRAILQNQGNLEHHHHHH

SEQ ID NO: 325 - protein, 207 aa, synthetic construct
MEASPASGPRHLMDPHIFTSNFNNGIGRHKTYLCYEVERLDNGTSVKMDQHRGFLHNQAKNLLCGFYGRHAELLFLDLVPSLQLDPAQIYRVTWFISWSPCFSWGCAGEVRAFLQENTHVRLRIFAARILDHNTLYKEALQMLRDAGAQVSIMTYDEFKHCWDTFVDHQGCPFQPWDGLDEHSQALSGRLRAILQNQGNLEHHHHHH

SEQ ID NO: 326 - protein, 207 aa, synthetic construct
MEASPASGPRHLMDPHIFTSNFNNGIGRHKTYLCYEVERLDNGTSVKMDQHRGFLHNQAKNLLCGFYGRHAELLFLDLVPSLQLDPAQIYRVTWFISWSPCFSWGCAGEVRAFLQENTHVRLRIFAARILDHPTLYKEALQMLRDAGAQVSIMTYDEFKHCWDTFVDHQGCPFQPWDGLDEHSQALSGRLRAILQNQGNLEHHHHHH

SEQ ID NO: 327 - protein, 207 aa, synthetic construct
MEASPASGPRHLMDPHIFTSNFNNGIGRHKTYLCYEVERLDNGTSVKMDQHRGFLHNQAKNLLCGFYGRHAELLFLDLVPSLQLDPAQIYRVTWFISWSPCFSWGCAGEVRAFLQENTHVRLRIFAARILDHQTLYKEALQMLRDAGAQVSIMTYDEFKHCWDTFVDHQGCPFQPWDGLDEHSQALSGRLRAILQNQGNLEHHHHHH

SEQ ID NO: 328 - protein, 207 aa, synthetic construct
MEASPASGPRHLMDPHIFTSNFNNGIGRHKTYLCYEVERLDNGTSVKMDQHRGFLHNQAKNLLCGFYGRHAELLFLDLVPSLQLDPAQIYRVTWFISWSPCFSWGCAGEVRAFLQENTHVRLRIFAARILDHRTLYKEALQMLRDAGAQVSIMTYDEFKHCWDTFVDHQGCPFQPWDGLDEHSQALSGRLRAILQNQGNLEHHHHHH

SEQ ID NO: 329 - protein, 207 aa, synthetic construct
MEASPASGPRHLMDPHIFTSNFNNGIGRHKTYLCYEVERLDNGTSVKMDQHRGFLHNQAKNLLCGFYGRHAELLFLDLVPSLQLDPAQIYRVTWFISWSPCFSWGCAGEVRAFLQENTHVRLRIFAARILDHSTLYKEALQMLRDAGAQVSIMTYDEFKHCWDTFVDHQGCPFQPWDGLDEHSQALSGRLRAILQNQGNLEHHHHHH

SEQ ID NO: 330 - protein, 207 aa, synthetic construct
MEASPASGPRHLMDPHIFTSNFNNGIGRHKTYLCYEVERLDNGTSVKMDQHRGFLHNQAKNLLCGFYGRHAELLFLDLVPSLQLDPAQIYRVTWFISWSPCFSWGCAGEVRAFLQENTHVRLRIFAARILDHTTLYKEALQMLRDAGAQVSIMTYDEFKHCWDTFVDHQGCPFQPWDGLDEHSQALSGRLRAILQNQGNLEHHHHHH

SEQ ID NO: 331 - protein, 207 aa, synthetic construct
MEASPASGPRHLMDPHIFTSNFNNGIGRHKTYLCYEVERLDNGTSVKMDQHRGFLHNQAKNLLCGFYGRHAELLFLDLVPSLQLDPAQIYRVTWFISWSPCFSWGCAGEVRAFLQENTHVRLRIFAARILDHVTLYKEALQMLRDAGAQVSIMTYDEFKHCWDTFVDHQGCPFQPWDGLDEHSQALSGRLRAILQNQGNLEHHHHHH

SEQ ID NO: 332 - protein, 207 aa, synthetic construct
MEASPASGPRHLMDPHIFTSNFNNGIGRHKTYLCYEVERLDNGTSVKMDQHRGFLHNQAKNLLCGFYGRHAELLFLDLVPSLQLDPAQIYRVTWFISWSPCFSWGCAGEVRAFLQENTHVRLRIFAARILDHWTLYKEALQMLRDAGAQVSIMTYDEFKHCWDTFVDHQGCPFQPWDGLDEHSQALSGRLRAILQNQGNLEHHHHHH

SEQ ID NO: 333 - protein, 207 aa, synthetic construct
MEASPASGPRHLMDPHIFTSNFNNGIGRHKTYLCYEVERLDNGTSVKMDQHRGFLHNQAKNLLCGFYGRHAELLFLDLVPSLQLDPAQIYRVTWFISWSPCFSWGCAGEVRAFLQENTHVRLRIFAARILDHYTLYKEALQMLRDAGAQVSIMTYDEFKHCWDTFVDHQGCPFQPWDGLDEHSQALSGRLRAILQNQGNLEHHHHHH

SEQ ID NO: 334 - protein, 207 aa, synthetic construct
MEASPASGPRHLMDPHIFTSNFNNGIGRHKTYLCYEVERLDNGTSVKMDQHRGFLHNQAKNLLCGFYGRHAELRFLDLVPSLQLDPAQIYRVTWFISWSPCFSWGCAGEVRAFLQENTHVRLRIFAARIYDYDPLYKEALQMLRDAGAQVSIMTYDEFKHCWDTFVDHQGAPFQPWDGLDEHSQALSGRLRAILQNQGNLEHHHHHH

SEQ ID NO: 335 - protein, 207 aa, synthetic construct
MEASPASGPRHLMDPHIFTSNFNNGIGRHKTYLCYEVERLDNGTSVKMDQHRGFLHNQAKNLLCGFYGRHAELRFLDLVPSLQLDPAQIYRVTWFISWSPCFSWGCAGEVRAFLQENTHVRLRIFAARIADYDPLYKEALQMLRDAGAQVSIMTYDEFKHCWDTFVDHQGAPFQPWDGLDEHSQALSGRLRAILQNQGNLEHHHHHH

SEQ ID NO: 336 - protein, 207 aa, synthetic construct
MEASPASGPRHLMDPHIFTSNFNNGIGRHKTYLCYEVERLDNGTSVKMDQHRGFLHNQAKNLLCGFYGRHAELRFLDLVPSLQLDPAQIYRVTWFISWSPCFSWGCAGEVRAFLQENTHVRLRIFAARIADHDPLYKEALQMLRDAGAQVSIMTYDEFKHCWDTFVDHQGAPFQPWDGLDEHSQALSGRLRAILQNQGNLEHHHHHH

SEQ ID NO: 337 - protein, 207 aa, synthetic construct
MEASPASGPRHLMDPHIFTSNFNNGIGRHKTYLCYEVERLDNGTSVKMDQHRGFLHNQAKNLLCGFYGRHAELRFLDLVPSLQLDPAQIYRVTWFISWSPCFSWGCACEVRAFLQENTHVRLRIFAARIADHDPLYKEALQMLRDAGAQVSIMTYDEFKHCWDTFVDHQGCPFQPWDGLDEHSQALSGRLRAILQNQGNLEHHHHHH

SEQ ID NO: 338 - protein, 207 aa, synthetic construct
MEASPASGPRHLMDPHIFTSNFNNGIGRHKTYLCYEVERLDNGTSVKMDQHRGFLHNQAKNLLCGFYGRHAELRFLDLVPSLQLDPAQIYRVTWFISWSPCFSWGCAIEVRAFLQENTHVRLRIFAARIADHDPLYKEALQMLRDAGAQVSIMTYDEFKHCWDTFVDHQGCPFQPWDGLDEHSQALSGRLRAILQNQGNLEHHHHHH

SEQ ID NO: 339 - protein, 207 aa, synthetic construct
MEASPASGPRHLMDPHIFTSNFNNGIGRHKTYLCYEVERLDNGTSVKMDQHRGFLHNQAKNLLCGFYGRHAELRFLDLVPSLQLDPAQIYRVTWFISWSPCFSWGCAPEVRAFLQENTHVRLRIFAARIADHDPLYKEALQMLRDAGAQVSIMTYDEFKHCWDTFVDHQGCPFQPWDGLDEHSQALSGRLRAILQNQGNLEHHHHHH

SEQ ID NO: 340 - protein, 207 aa, synthetic construct
MEASPASGPRHLMDPHIFTSNFNNGIGRHKTYLCYEVERLDNGTSVKMDQHRGFLHNQAKNLLCGFYGRHAELRFLDLVPSLQLDPAQIYRVTWFISWSPCFSWGCAFEVRAFLQENTHVRLRIFAARIADHDPLYKEALQMLRDAGAQVSIMTYDEFKHCWDTFVDHQGCPFQPWDGLDEHSQALSGRLRAILQNQGNLEHHHHHH

SEQ ID NO: 341 - protein, 207 aa, synthetic construct
MEASPASGPRHLMDPHIFTSNFNNGIGRHKTYLCYEVERLDNGTSVKMDQHRGFLHNQAKNLLCGFYGRHAELRFLDLVPSLQLDPAQIYRVTWFISWSPCFSWGCAAEVRAFLQENTHVRLRIFAARIADHDPLYKEALQMLRDAGAQVSIMTYDEFKHCWDTFVDHQGCPFQPWDGLDEHSQALSGRLRAILQNQGNLEHHHHHH

SEQ ID NO: 342 - protein, 207 aa, synthetic construct
MEASPASGPRHLMDPHIFTSNFNNGIGRHKTYLCYEVERLDNGTSVKMDQHRGFLHNQAKNLLCGFYGRHAELRFLDLVPSLQLDPAQIYRVTWFISWSPCFSWGCAGEVRAFLQENTHVRLRIFAARIADHDPLYKEALQMLRDAGAQVSIMTYDEFKHCWDTFVDHQGCPFQPWDGLDEHSQALSIRLRAILQNQGNLEHHHHHH

SEQ ID NO: 343 - protein, 207 aa, synthetic construct
MEASPASGPRHLMDPHIFTSNFNNGIGRHKTYLCYEVERLDNGTSVKMDQHRGFLHNQAKNLLCGFYGRHAELRFLDLVPSLQLDPAQIYRVTWFISWSPCFSWGCAGEVRAFLQENTHVRLRIFAARIADHDPLYKEALQMLRDAGAQVSIMTYDEFKHCWDTFVDHQGCPFQPWDGLDEHSQALSYRLRAILQNQGNLEHHHHHH

SEQ ID NO: 344 - protein, 207 aa, synthetic construct
MEASPASGPRHLMDPHIFTSNFNNGIGRHKTYLCYEVERLDNGTSVKMDQHRGFLHNQAKNLLCGFYGRHAELRFLDLVPSLQLDPAQIYRVTWFISWSPCFSWGCAGEVRAFLQENTHVRLRIFAARIADHDPLYKEALQMLRDAGAQVSIMTYDEFKHCWDTFVDHQGCPFQPWDGLDEHSQALSQRLRAILQNQGNLEHHHHHH

SEQ ID NO: 345 - protein, 207 aa, synthetic construct
MEASPASGPRHLMDPHIFTSNFNNGIGRHKTYLCYEVERLDNGTSVKMDQHRGFLHNQAKNLLCGFYGRHAELRFLDLVPSLQLDPAQIYRVTWFISWSPCFSWGCAGEVRAFLQENTHVRLRIFAARIADHDPLYKEALQMLRDAGAQVSIMTYDEFKHCWDTFVDHQGCPFQPWDGLDEHSQALSRRLRAILQNQGNLEHHHHHH

SEQ ID NO: 346 - protein, 207 aa, synthetic construct
MEASPASGPRHLMDPHIFTSNFNNRIGRHKTYLCYEVERLDNGTSVKMDQHRGFLHNQAKNLLCGFYGRHAELRFLDLVPSLQLDPAQIYRVTWFISWSPCFSWGCAGEVRAFLQENTHVRLRIFAARIADHDPLYKEALQMLRDAGAQVSIMTYDEFKHCWDTFVDHQGCPFQPWDGLDEHSQALSGRLRAILQNQGNLEHHHHHH

SEQ ID NO: 347 - protein, 207 aa, synthetic construct
MEASPASGPRHLMDPHIFTSNFNNLIGRHKTYLCYEVERLDNGTSVKMDQHRGFLHNQAKNLLCGFYGRHAELRFLDLVPSLQLDPAQIYRVTWFISWSPCFSWGCAGEVRAFLQENTHVRLRIFAARIADHDPLYKEALQMLRDAGAQVSIMTYDEFKHCWDTFVDHQGCPFQPWDGLDEHSQALSGRLRAILQNQGNLEHHHHHH

SEQ ID NO: 348 - protein, 207 aa, synthetic construct
MEASPASGPRHLMDPLIFTSNFNNGIGRHKTYLCYEVERLDNGTSVKMDQHRGFLHNQAKNLLCGFYGRHAELRFLDLVPSLQLDPAQIYRVTWFISWSPCFSWGCAGEVRAFLQENTHVRLRIFAARIADHDPLYKEALQMLRDAGAQVSIMTYDEFKHCWDTFVDHQGCPFQPWDGLDEHSQALSGRLRAILQNQGNLEHHHHHH

SEQ ID NO: 349 - protein, 207 aa, synthetic construct
MEASPASGPRHLMDPWIFTSNFNNGIGRHKTYLCYEVERLDNGTSVKMDQHRGFLHNQAKNLLCGFYGRHAELRFLDLVPSLQLDPAQIYRVTWFISWSPCFSWGCAGEVRAFLQENTHVRLRIFAARIADHDPLYKEALQMLRDAGAQVSIMTYDEFKHCWDTFVDHQGCPFQPWDGLDEHSQALSGRLRAILQNQGNLEHHHHHH

SEQ ID NO: 350 - protein, 207 aa, synthetic construct
MEASPASGPRHLMDPHIFTSNFNNGIGRHKTYLCYEVERLDNGTSVKMDQHRGFLHNQAKNLLCGFYGRHAELRFLDLVPSLQLDPAQIYRVTWFISWSPCFSWGCAGEVRAFLQENTHVRLRIFAARIADHDPLYKEALQMLRDAGAQVSIMTYDEFKHCWDTFVDHQGCPFQPWDGLDEHSQALLGRLRAILQNQGNLEHHHHHH

SEQ ID NO: 351 - protein, 207 aa, synthetic construct
MEASPASGPRHLMDPHIFTSNFNNGIGRHKTYLCYEVERLDNGTSVKMDQHRGFLHNQAKNLLCGFYGRHAELRFLDLVPSLQLDPAQIYRVTWFISWSPCFSWGCAGEVRAFLQENTHVRLRIFAARIADHDPLYKEALQMLRDAGAQVSIMTYDEFKHCWDTFVDHQGCPFQPWDGLDEHSQAWSGRLRAILQNQGNLEHHHHHH

SEQ ID NO: 352 - protein, 207 aa, synthetic construct
MEASPASGPRHLMDPHIFTSNFNNGIGRHKTYLCYEVERLDNGTSVKMDQHRGFLHNQAKNLLCGFYGRHAELRFLDLVPSLQLDPAQIYRVTWFISWSPCFSWGCAGEVRAFLQENTHVRLRIFAARIADHDPLYKEALQMLRDAGAQVSIMTYDEFKHCWDTFVDHQGCPFQPWDGLWEHSQALSGRLRAILQNQGNLEHHHHHH

SEQ ID NO: 353 - protein, 207 aa, synthetic construct
MEASPASGPRHLMDPHIFTSNFNNGIGRHKTYLCYEVERLDNGTSVKMDQHRGFLHNQAKNLLCGFYGRHAELRFLDLVPSLQLDPAQIYRVTWFISWSPCFSWGCAGEVRAFLQENWHVRLRIFAARIADHDPLYKEALQMLRDAGAQVSIMTYDEFKHCWDTFVDHQGCPFQPWDGLDEHSQALSGRLRAILQNQGNLEHHHHHH

SEQ ID NO: 354 - protein, 207 aa, synthetic construct
MEASPASGPRHLMDPHIFTSNFNNGIGRHKTYLCYEVERLDNGTSVKMDQHRGFLHNQAKNLLCGFYGRHAELRFLDLVPSLQLDPAQIYLVTWFISWSPCFSWGCAGEVRAFLQENTHVRLRIFAARIADHDPLYKEALQMLRDAGAQVSIMTYDEFKHCWDTFVDHQGCPFQPWDGLDEHSQALSGRLRAILQNQGNLEHHHHHH

SEQ ID NO: 355 - protein, 207 aa, synthetic construct
MEASPASGPRHLMDPHIFTSNFNNGIGRHKTYLCYEVERLDNGTSVKMDQLRGFLHNQAKNLLCGFYGRHAELRFLDLVPSLQLDPAQIYRVTWFISWSPCFSWGCAGEVRAFLQENTHVRLRIFAARIADHDPLYKEALQMLRDAGAQVSIMTYDEFKHCWDTFVDHQGCPFQPWDGLDEHSQALSGRLRAILQNQGNLEHHHHHH

SEQ ID NO: 356 - protein, 207 aa, synthetic construct
MEASPASGPRHLMDPHIFTSNFNNGIGRHKTYLCYEVERLDNGTTVKMDQHRGFLHNQAKNLLCGFYGRHAELRFLDLVPSLQLDPAQIYRVTWFISWSPCFSWGCAGEVRAFLQENTHVRLRIFAARIADHDPLYKEALQMLRDAGAQVSIMTYDEFKHCWDTFVDHQGCPFQPWDGLDEHSQALSGRLRAILQNQGNLEHHHHHH

SEQ ID NO: 357 - protein, 207 aa, synthetic construct
MEASPASGPRHLMDPHIFYSNFNNGIGRHKTYLCYEVERLDNGTSVKMDQHRGFLHNQAKNLLCGFYGRHAELRFLDLVPSLQLDPAQIYRVTWFISWSPCFSWGCAGEVRAFLQENTHVRLRIFAARIADHDPLYKEALQMLRDAGAQVSIMTYDEFKHCWDTFVDHQGCPFQPWDGLDEHSQALSGRLRAILQNQGNLEHHHHHH

SEQ ID NO: 358 - protein, 207 aa, synthetic construct
MEASPASGPRHLMDPHIFTSNFNNGIGRHKTYLCYEVERLDNGTSVKMDQHRGFLHNQAKNLLCGFRGRHAELRFLDLVPSLQLDPAQIYRVTWFISWSPCFSWGCAGEVRAFLQENTHVRLRIFAARIADHDPLYKEALQMLRDAGAQVSIMTYDEFKHCWDTFVDHQGCPFQPWDGLDEHSQALSGRLRAILQNQGNLEHHHHHH

SEQ ID NO: 359 - protein, 207 aa, synthetic construct
MEASPASGPRHLMDPHIFTSNFNNGIGRHKTYLCYEVERLDNGTSVKMDQHRGFLHNQAKNLLCGFYGRHAEARFLDLVPSLQLDPAQIYRVTWFISWSPCFSWGCAGEVRAFLQENTHVRLRIFAARIADHDPLYKEALQMLRDAGAQVSIMTYDEFKHCWDTFVDHQGCPFQPWDGLDEHSQALSGRLRAILQNQGNLEHHHHHH

SEQ ID NO: 360 - protein, 207 aa, synthetic construct
MEASPASGPRHLMDPHIFTSNFNNGIGRHKTYLCYEVERLDNGTSVKMDQHRGFLHNQAKNLLCGFYGRHAELNFLDLVPSLQLDPAQIYRVTWFISWSPCFSWGCAGEVRAFLQENTHVRLRIFAARIADHDPLYKEALQMLRDAGAQVSIMTYDEFKHCWDTFVDHQGCPFQPWDGLDEHSQALSGRLRAILQNQGNLEHHHHHH

SEQ ID NO: 361 - protein, 207 aa, synthetic construct
MEASPASGPRHLMDPHIFTSNFNNGIGRHKTYLCYEVERLDNGTSVKMDQHRGFLHNQAKNLLCGFYGRHAELRFLDLVPSLQLDPAQIGRVTWFISWSPCFSWGCAGEVRAFLQENTHVRLRIFAARIADHDPLYKEALQMLRDAGAQVSIMTYDEFKHCWDTFVDHQGCPFQPWDGLDEHSQALSGRLRAILQNQGNLEHHHHHH

SEQ ID NO: 362 - protein, 207 aa, synthetic construct
MEASPASGPRHLMDPHIFTSNFNNGIGRHKTYLCYEVERLDNGTSVKMDQHRGFLHNQAKNLLCGFYGRHAELRFLDLVPSLQLDPAQIYRVTLFISWSPCFSWGCAGEVRAFLQENTHVRLRIFAARIADHDPLYKEALQMLRDAGAQVSIMTYDEFKHCWDTFVDHQGCPFQPWDGLDEHSQALSGRLRAILQNQGNLEHHHHHH

SEQ ID NO: 363 - protein, 207 aa, synthetic construct
MEASPASGPRHLMDPHIFTSNFNNGIGRHKTYLCYEVERLDNGTSVKMDQHRGFLHNQAKNLLCGFYGRHAELRFLDLVPSLQLDPAQIYRVTWFTSWSPCFSWGCAGEVRAFLQENTHVRLRIFAARIADHDPLYKEALQMLRDAGAQVSIMTYDEFKHCWDTFVDHQGCPFQPWDGLDEHSQALSGRLRAILQNQGNLEHHHHHH

SEQ ID NO: 364 - protein, 207 aa, synthetic construct
MEASPASGPRHLMDPHIFTSNFNNGIGRHKTYLCYEVERLDNGTSVKMDQHRGFLHNQAKNLLCGFYGRHAELRFLDLVPSLQLDPAQIYRVTWFISWSPCFSWSCAGEVRAFLQENTHVRLRIFAARIADHDPLYKEALQMLRDAGAQVSIMTYDEFKHCWDTFVDHQGCPFQPWDGLDEHSQALSGRLRAILQNQGNLEHHHHHH

SEQ ID NO: 365 - protein, 199 aa, synthetic construct
MEASPASGPRHLMDPHIFTSNFNNVIGRHKTYLCYEVERLDNGTSVKMDQHRGFLHNQAKNLLCGFYGRHAELRFLDLVPSLQLDPAQIYRVTWFISWSPCFSWGCAGEVRAFLQENTHVRLRIFAARIADHDPLYKEALQMLRDAGAQVSIMTYDEFKHCWDTFVDHQGCPFQPWDGLDEHSQALSGRLRAILQNQGN

SEQ ID NO: 366 - protein, 199 aa, synthetic construct
MEASPASGPRHLMDPHIFTSNFNNGIGRHKTYLCYEVERLDNGTWVKMDQHRGFLHNQAKNLLCGFYGRHAELRFLDLVPSLQLDPAQIYRVTWFISWSPCFSWGCAGEVRAFLQENTHVRLRIFAARIADHDPLYKEALQMLRDAGAQVSIMTYDEFKHCWDTFVDHQGCPFQPWDGLDEHSQALSGRLRAILQNQGN

SEQ ID NO: 367 - protein, 199 aa, synthetic construct
MEASPASGPRHLMDPHIFTSNFNNGIGRHKTYLCYEVERLDNGTSVKMDQHRGFLHNQAKNLLCGFYGRHAELRFLDLVPSLQLDPAQIYRVTWFISWSPCFSWGCAGQVRAFLQENTHVRLRIFAARIADHDPLYKEALQMLRDAGAQVSIMTYDEFKHCWDTFVDHQGCPFQPWDGLDEHSQALSGRLRAILQNQGN

SEQ ID NO: 368 - protein, 199 aa, synthetic construct
MEASPASGPRHLMDPHIFTSNFNNGIGRHKTYLCYEVERLDNGTSVKMDQHRGFLHNQAKNLLCGFYGRHAELRFLDLVPSLQLDPAQIYRVTWFISWSPCFSWGCAGEVRAFLQENTHVRLHIFAARIADHDPLYKEALQMLRDAGAQVSIMTYDEFKHCWDTFVDHQGCPFQPWDGLDEHSQALSGRLRAILQNQGN

SEQ ID NO: 369 - protein, 199 aa, synthetic construct
MEASPASGPRHLMDPHIFTSNFNNGIGRHKTYLCYEVERLDNGTSVKMDQHRGFLHNQAKNLLCGFYGRHAELRFLDLVPSLQLDPAQIYRVTWFISWSPCFSWGCAGEVRAFLQENTHVRLRIFAARIADHDPLYKEALQMLRDAGAQVSIMTYDEFKHCWDTFVDHQGCPFQPWDGLEEHSQALSGRLRAILQNQGN

SEQ ID NO: 370-372 - skipped (3 entries)

SEQ ID NO: 373 - protein, 199 aa, synthetic construct
MEASPASGPRHLMDPHIFTSNFNNGIGRHKTYLCYEVERLDNGTSVKMDQHRGFLHNQAKNLLCGFYGRHAELLFLDLVPSLQLDPAQIYRVTWFISWSPCFSWGCAGEVRAFLQENTHVRLRIFAARIADHDPLYKEALQMLRDAGAQVSIMTYDEFKHCWDTFVDHQGCPFQPWDGLDEHSQALSGRLRAILQNQGN

SEQ ID NO: 374-375 - skipped (2 entries)

SEQ ID NO: 376 - protein, 199 aa, synthetic construct
MEASPASGPRHLMDPHIFTSNFNNGIGRHKTYLCYEVERLDNGTSVKMDQHRGFLHNQAKNLLCGFYGRHAELLFLDLVPSLQLDPAQIYRVTWFISWSPCFSWGCAGEVRAFLQENTHVRLRIFAARIADHWPLYKEALQMLRDAGAQVSIMTYDEFKHCWDTFVDHQGAPFQPWDGLDEHSQALSGRLRAILQNQGN

SEQ ID NO: 377 - protein, 199 aa, synthetic construct
MEASPASGPRHLMDPHIFYSNFNNGIGRHKTYLCYEVERLDNGTSVKMDQHRGFLHNQAKNLLCGFYGRHAELRFLDLVPSLQLDPAQIYRVTWFISWSPCFSWGCAGEVRAFLQENTHVRLRIFAARIADHWPLYKEALQMLRDAGAQVSIMTYDEFKHCWDTFVDHQGCPFQPWDGLDEHSQALSGRLRAILQNQGN

SEQ ID NO: 378 - protein, 199 aa, synthetic construct
MEASPASGPRHLMDPHIFTSNFNNRIGRHKTYLCYEVERLDNGTSVKMDQHRGFLHNQAKNLLCGFYGRHAELRFLDLVPSLQLDPAQIYRVTWFISWSPCFSWGCAGEVRAFLQENTHVRLRIFAARIADHWPLYKEALQMLRDAGAQVSIMTYDEFKHCWDTFVDHQGCPFQPWDGLDEHSQALSGRLRAILQNQGN

SEQ ID NO: 379 - skipped

SEQ ID NO: 380 - protein, 199 aa, synthetic construct
MEASPASGPRHLMDPHIFTSNFNNRIGRHKTYLCYEVERLDNGTSVKMDQHRGFLHNQAKNLLCGFYGRHAELLFLDLVPSLQLDPAQIYRVTWFISWSPCFSWGCAGEVRAFLQENTHVRLRIFAARIADHWPLYKEALQMLRDAGAQVSIMTYDEFKHCWDTFVDHQGCPFQPWDGLDEHSQALSGRLRAILQNQGN

SEQ ID NO: 381 - protein, 212 aa, synthetic construct
MHHHHHHGGSGGGSEASPASGPRHLMDPHIFTSNFNNGIGRHKTYLCYEVERLDNGTSVKMDQHRGFLHNQAKNLLCGFYGRHAELRFLDLVPSLQLDPAQIYRVTWFISWSPCFSWGCAGEVRAFLQENTHVRLRIFAARIADHDPLYKEALQMLRDAGAQVSIMTYDEFKHCWDTFVDHQGAPFQPWDGLDEHSQALSGRLRAILQNQGN

SEQ ID NO: 382 - protein, 199 aa, synthetic construct
MEASPASGPRHLMDPHIFISNFNNGIGRHKTYLCYEVERLDNGTSVKMDQHRGFLHNQAKNLLCGFYGRHAELLFLDLVPSLQLDPAQIYRVTWFISWSPCFSWGCAGEVRAFLQENTHVRLRIFAARIADHWPLYKEALQMLRDAGAQVSIMTYDEFKHCWDTFVDHQGAPFQPWDGLDEHSQALSGRLRAILQNQGN

SEQ ID NO: 383 - protein, 199 aa, synthetic construct
MEASPASGPRHLMDPHIFLSNFNNGIGRHKTYLCYEVERLDNGTSVKMDQHRGFLHNQAKNLLCGFYGRHAELLFLDLVPSLQLDPAQIYRVTWFISWSPCFSWGCAGEVRAFLQENTHVRLRIFAARIADHWPLYKEALQMLRDAGAQVSIMTYDEFKHCWDTFVDHQGAPFQPWDGLDEHSQALSGRLRAILQNQGN

SEQ ID NO: 384 - protein, 199 aa, synthetic construct
MEASPASGPRHLMDPHIFYSNFNNGRGRHKTYLCYEVERLDNGTSVKMDQHRGFLHNQAKNLLCGFYGRHAELLFLDLVPSLQLDPAQIYRVTWFISWSPCFSWGCAGEVRAFLQENTHVRLRIFAARIADHWPLYKEALQMLRDAGAQVSIMTYDEFKHCWDTFVDHQGAPFQPWDGLDEHSQALSGRLRAILQNQGN

SEQ ID NO: 385 - protein, 199 aa, synthetic construct
MEASPASGPRHLMDPHIFYSNFNNGIGRHKTYLCYEVERLDNGTSVKMDQHRGFLHNQAKNLLCGFYGRHAELLFLRLVPSLQLDPAQIYRVTWFISWSPCFSWGCAGEVRAFLQENTHVRLRIFAARIADHWPLYKEALQMLRDAGAQVSIMTYDEFKHCWDTFVDHQGAPFQPWDGLDEHSQALSGRLRAILQNQGN

SEQ ID NO: 386 - protein, 199 aa, synthetic construct
MEASPASGPRHLMDPHIFYSNFNNGIGRHKTYLCYEVERLDNGTSVKMDQHRGFLHNQAKNLLCGFYGRHAELLFLDHVPSLQLDPAQIYRVTWFISWSPCFSWGCAGEVRAFLQENTHVRLRIFAARIADHWPLYKEALQMLRDAGAQVSIMTYDEFKHCWDTFVDHQGAPFQPWDGLDEHSQALSGRLRAILQNQGN

SEQ ID NO: 387 - protein, 199 aa, synthetic construct
MEASPASGPRHLMDPHIFYSNFNNGIGRHKTYLCYEVERLDNGTSVKMDQHRGFLHNQAKNLLCGFYGRHAELLFLDLVGSLQLDPAQIYRVTWFISWSPCFSWGCAGEVRAFLQENTHVRLRIFAARIADHWPLYKEALQMLRDAGAQVSIMTYDEFKHCWDTFVDHQGAPFQPWDGLDEHSQALSGRLRAILQNQGN

SEQ ID NO: 388 - protein, 199 aa, synthetic construct
MEASPASGPRHLMDPHIFYSNFNNGIGRHKTYLCYEVERLDNGTSVKMDQHRGFLHNQAKNLLCGFYGRHAELLFLDLVSSLQLDPAQIYRVTWFISWSPCFSWGCAGEVRAFLQENTHVRLRIFAARIADHWPLYKEALQMLRDAGAQVSIMTYDEFKHCWDTFVDHQGAPFQPWDGLDEHSQALSGRLRAILQNQGN

SEQ ID NO: 389 - protein, 199 aa, synthetic construct
MEASPASGPRHLMDPHIFYSNFNNGIGRHKTYLCYEVERLDNGTSVKMDQHRGFLHNQAKNLLCGFYGRHAELLFLDLVPSLQLDPAQIYRVTWFISWSPCFSWGCAGEVRAFLQENTHVRLRIFAARIADHWPLYKEALQMLRDAGVQVSIMTYDEFKHCWDTFVDHQGAPFQPWDGLDEHSQALSGRLRAILQNQGN

SEQ ID NO: 390 - protein, 199 aa, synthetic construct
MEASPASGPRHLMYPHIFYSNFNNGIGRHKTYLCYEVERLDNGTSVKMDQHRGFLHNQAKNLLCGFYGRHAELLFLDLVPSLQLDPAQIYRVTWFISWSPCFSWGCAGEVRAFLQENTHVRLRIFAARIADHWPLYKEALQMLRDAGAQVSIMTYDEFKHCWDTFVDHQGAPFQPWDGLDEHSQALSGRLRAILQNQGN

SEQ ID NO: 391 - protein, 199 aa, synthetic construct
MEASPASGPRHLMDPHTFYSNFNNGIGRHKTYLCYEVERLDNGTSVKMDQHRGFLHNQAKNLLCGFYGRHAELLFLDLVPSLQLDPAQIYRVTWFISWSPCFSWGCAGEVRAFLQENTHVRLRIFAARIADHWPLYKEALQMLRDAGAQVSIMTYDEFKHCWDTFVDHQGAPFQPWDGLDEHSQALSGRLRAILQNQGN

SEQ ID NO: 392 - protein, 199 aa, synthetic construct
MEASPASGPRHLMDPHIFYFNFNNGIGRHKTYLCYEVERLDNGTSVKMDQHRGFLHNQAKNLLCGFYGRHAELLFLDLVPSLQLDPAQIYRVTWFISWSPCFSWGCAGEVRAFLQENTHVRLRIFAARIADHWPLYKEALQMLRDAGAQVSIMTYDEFKHCWDTFVDHQGAPFQPWDGLDEHSQALSGRLRAILQNQGN

SEQ ID NO: 393 - protein, 199 aa, synthetic construct
MEASPASGPRHLMDPHIFYSHFNNGIGRHKTYLCYEVERLDNGTSVKMDQHRGFLHNQAKNLLCGFYGRHAELLFLDLVPSLQLDPAQIYRVTWFISWSPCFSWGCAGEVRAFLQENTHVRLRIFAARIADHWPLYKEALQMLRDAGAQVSIMTYDEFKHCWDTFVDHQGAPFQPWDGLDEHSQALSGRLRAILQNQGN

SEQ ID NO: 394 - protein, 199 aa, synthetic construct
MEASPASGPRHLMDPHIFYSNFNNAIGRHKTYLCYEVERLDNGTSVKMDQHRGFLHNQAKNLLCGFYGRHAELLFLDLVPSLQLDPAQIYRVTWFISWSPCFSWGCAGEVRAFLQENTHVRLRIFAARIADHWPLYKEALQMLRDAGAQVSIMTYDEFKHCWDTFVDHQGAPFQPWDGLDEHSQALSGRLRAILQNQGN

SEQ ID NO: 395 - protein, 199 aa, synthetic construct
MEASPASGPRHLMDPHIFYSNFNNGIGRHKTYLCYEVERLKNGTSVKMDQHRGFLHNQAKNLLCGFYGRHAELLFLDLVPSLQLDPAQIYRVTWFISWSPCFSWGCAGEVRAFLQENTHVRLRIFAARIADHWPLYKEALQMLRDAGAQVSIMTYDEFKHCWDTFVDHQGAPFQPWDGLDEHSQALSGRLRAILQNQGN

SEQ ID NO: 396 - skipped

SEQ ID NO: 397 - protein, 199 aa, synthetic construct
MEASPASGPRHLMDPHIFFSNFNNRIGRHKTYLCYEVERLDNGTSVKMDQHRGFLHNQAKNLLCGFYGRHAELLFLDLVPSLQLDPAQIYRVTWFISWSPCFSWGCAGEVRAFLQENTHVRLRIFAARIADHWPLYKEALQMLRDAGAQVSIMTYDEFKHCWDTFVDHQGAPFQPWDGLDEHSQALSGRLRAILQNQGN

SEQ ID NO: 398 - protein, 199 aa, synthetic construct
MEASPASGPRHLMDPHIFYSNFNNRLGRHKTYLCYEVERLDNGTSVKMDQHRGFLHNQAKNLLCGFYGRHAELLFLDLVPSLQLDPAQIYRVTWFISWSPCFSWGCAGEVRAFLQENTHVRLRIFAARIADHWPLYKEALQMLRDAGAQVSIMTYDEFKHCWDTFVDHQGAPFQPWDGLDEHSQALSGRLRAILQNQGN

SEQ ID NO: 399 - protein, 199 aa, synthetic construct
MEASPASGPRHLMDPHIFYSNFNNGIGRHKTYLCYEVERLDNGTSVKMDQHRGFLHNQAKNLLCGFYGRHAELLFLDLVPSLQLDPAQTYRVTWFISWSPCFSWGCAGEVRAFLQENTHVRLRIFAARIADHWPLYKEALQMLRDAGAQVSIMTYDEFKHCWDTFVDHQGAPFQPWDGLDEHSQALSGRLRAILQNQGN

SEQ ID NO: 400 - protein, 199 aa, synthetic construct
MEASPASGPRHLMDPHIFYSNFNNGIGRHKTYLCYEVERLDNGTSVKMDQHRGFLHNQAKNLLCGFYGRHAELLFLDLVPSLQLDPAQRYRVTWFISWSPCFSWGCAGEVRAFLQENTHVRLRIFAARIADHWPLYKEALQMLRDAGAQVSIMTYDEFKHCWDTFVDHQGAPFQPWDGLDEHSQALSGRLRAILQNQGN

SEQ ID NO: 401 - protein, 199 aa, synthetic construct
MEASPASGPRHLMDPHIFYSNFNNGIGRHKTYLCYEVERLDNGTSVKMDQHRGFLHNQAKNLLCGFYGRHAELLFLDLVPSLQLDPAQHYRVTWFISWSPCFSWGCAGEVRAFLQENTHVRLRIFAARIADHWPLYKEALQMLRDAGAQVSIMTYDEFKHCWDTFVDHQGAPFQPWDGLDEHSQALSGRLRAILQNQGN

SEQ ID NO: 402 - protein, 199 aa, synthetic construct
MEASPASGPRHLMDPHIFYSNFNNDIGRHKTYLCYEVERLDNGTSVKMDQHRGFLHNQAKNLLCGFYGRHAELLFLDLVPSLQLDPAQIYRVTWFISWSPCFSWGCAGEVRAFLQENTHVRLRIFAARIADHWPLYKEALQMLRDAGAQVSIMTYDEFKHCWDTFVDHQGAPFQPWDGLDEHSQALSGRLRAILQNQGN

SEQ ID NO: 403 - protein, 199 aa, synthetic construct
MEASPASGPRHLMDPHIFYSNFNNGIGRHKTYLCYEVERLDNGTSVKMDQHRGFLHNQAKNLLCGFYGRHAELLFLDLVPSLQLDPAQIYRVTWFISWSPCFSWGCAGEVRAFLQENTHVRLRIFAARIADHWPLYKEALRMLRDAGAQVSIMTYDEFKHCWDTFVDHQGAPFQPWDGLDEHSQALSGRLRAILQNQGN

SEQ ID NO: 404 - protein, 199 aa, synthetic construct
MEASPASGPRHLMDPHIFYSNFNNGIGRHKTYLCYEVERLDNGTSVKMDQHRGFLHNQAKNLLCGFYGRHAELLFLDLVPSLQLDPAQCYRVTWFISWSPCFSWGCAGEVRAFLQENTHVRLRIFAARIADHWPLYKEALQMLRDAGAQVSIMTYDEFKHCWDTFVDHQGAPFQPWDGLDEHSQALSGRLRAILQNQGN

SEQ ID NO: 405 - protein, 199 aa, synthetic construct
MEASPASGPRHLMDPHIFYSNFNNGIGRHKTYLCYEVERLDNGTRVKMDQHRGFLHNQAKNLLCGFYGRHAELLFLDLVPSLQLDPAQIYRVTWFISWSPCFSWGCAGEVRAFLQENTHVRLRIFAARIADHWPLYKEALQMLRDAGAQVSIMTYDEFKHCWDTFVDHQGAPFQPWDGLDEHSQALSGRLRAILQNQGN

SEQ ID NO: 406 - protein, 199 aa, synthetic construct
MEASPASGPRHLMDPHIFYSNFNNGIGRHKTYLCYEVERLDNGTSVKMDQHRGFLHNQAKNLLCGFYGRHAELLFLDLVPSLQLDPAQQYRVTWFISWSPCFSWGCAGEVRAFLQENTHVRLRIFAARIADHWPLYKEALQMLRDAGAQVSIMTYDEFKHCWDTFVDHQGAPFQPWDGLDEHSQALSGRLRAILQNQGN

SEQ ID NO: 407 - protein, 199 aa, synthetic construct
MEASPASGPRHLMDPHIFYSNFNNGIGRHKTYLCYEVERLDNGTSVKMDQHRGFLHNQAKNLLCGFYGRHAELLFLDLVPSLQLDPAQSYRVTWFISWSPCFSWGCAGEVRAFLQENTHVRLRIFAARIADHWPLYKEALQMLRDAGAQVSIMTYDEFKHCWDTFVDHQGAPFQPWDGLDEHSQALSGRLRAILQNQGN

SEQ ID NO: 408 - protein, 199 aa, synthetic construct
MEASPASGPRHLMDPHIFYSNFNNGIGRHKTYLCYEVERLDNGTSVKMDQHRGFLHNQAKNLLCGFYGRHAELLFLDLVPSLQLDPAQDYRVTWFISWSPCFSWGCAGEVRAFLQENTHVRLRIFAARIADHWPLYKEALQMLRDAGAQVSIMTYDEFKHCWDTFVDHQGAPFQPWDGLDEHSQALSGRLRAILQNQGN

SEQ ID NO: 409 - protein, 199 aa, synthetic construct
MEASPASGPRHLMDPHIFYSNFNNGIGRHKTYLCYEVERLDNGTSVKMDQHRGFLHNQAKNLLCGFYGRHAELCFLDLVPSLQLDPAQIYRVTWFISWSPCFSWGCAGEVRAFLQENTHVRLRIFAARIADHWPLYKEALQMLRDAGAQVSIMTYDEFKHCWDTFVDHQGAPFQPWDGLDEHSQALSGRLRAILQNQGN

SEQ ID NO: 410 - protein, 199 aa, synthetic construct
MEASPASGPRPLMDPHIFYSNFNNGIGRHKTYLCYEVERLDNGTSVKMDQHRGFLHNQAKNLLCGFYGRHAELLFLDLVPSLQLDPAQIYRVTWFISWSPCFSWGCAGEVRAFLQENTHVRLRIFAARIADHWPLYKEALQMLRDAGAQVSIMTYDEFKHCWDTFVDHQGAPFQPWDGLDEHSQALSGRLRAILQNQGN

SEQ ID NO: 411 - protein, 199 aa, synthetic construct
MEASPASGPRRLMDPHIFYSNFNNGIGRHKTYLCYEVERLDNGTSVKMDQHRGFLHNQAKNLLCGFYGRHAELLFLDLVPSLQLDPAQIYRVTWFISWSPCFSWGCAGEVRAFLQENTHVRLRIFAARIADHWPLYKEALQMLRDAGAQVSIMTYDEFKHCWDTFVDHQGAPFQPWDGLDEHSQALSGRLRAILQNQGN

SEQ ID NO: 412 - protein, 199 aa, synthetic construct
MEASPASGPRHLMDPHIFFSNFNNGIGRHKTYLCYEVERLDNGTSVKMDQHRGFLHNQAKNLLCGFYGRHAELLFLDLVPSLQLDPAQIYRVTWFISWSPCFSWGCAGEVRAFLQENTHVRLRIFAARIADHWPLYKEALQMLRDAGAQVSIMTYDEFKHCWDTFVDHQGAPFQPWDGLDEHSQALSGRLRAILQNQGN

SEQ ID NO: 413 - protein, 199 aa, synthetic construct
MEASPASGPRHLMDPHIFWSNFNNGIGRHKTYLCYEVERLDNGTSVKMDQHRGFLHNQAKNLLCGFYGRHAELLFLDLVPSLQLDPAQIYRVTWFISWSPCFSWGCAGEVRAFLQENTHVRLRIFAARIADHWPLYKEALQMLRDAGAQVSIMTYDEFKHCWDTFVDHQGAPFQPWDGLDEHSQALSGRLRAILQNQGN

SEQ ID NO: 414 - protein, 199 aa, synthetic construct
MEASPASGPRHLMDPHIFYSNFNNGIIRHKTYLCYEVERLDNGTSVKMDQHRGFLHNQAKNLLCGFYGRHAELLFLDLVPSLQLDPAQIYRVTWFISWSPCFSWGCAGEVRAFLQENTHVRLRIFAARIADHWPLYKEALQMLRDAGAQVSIMTYDEFKHCWDTFVDHQGAPFQPWDGLDEHSQALSGRLRAILQNQGN

SEQ ID NO: 415 - protein, 199 aa, synthetic construct
MEASPASGPRHLMDPHIFYSNFNNGIGRHKIYLCYEVERLDNGTSVKMDQHRGFLHNQAKNLLCGFYGRHAELLFLDLVPSLQLDPAQIYRVTWFISWSPCFSWGCAGEVRAFLQENTHVRLRIFAARIADHWPLYKEALQMLRDAGAQVSIMTYDEFKHCWDTFVDHQGAPFQPWDGLDEHSQALSGRLRAILQNQGN

SEQ ID NO: 416 - protein, 199 aa, synthetic construct
MEASPASGPRHLMDPHIFYSNFNNGIGRHKTYLLYEVERLDNGTSVKMDQHRGFLHNQAKNLLCGFYGRHAELLFLDLVPSLQLDPAQIYRVTWFISWSPCFSWGCAGEVRAFLQENTHVRLRIFAARIADHWPLYKEALQMLRDAGAQVSIMTYDEFKHCWDTFVDHQGAPFQPWDGLDEHSQALSGRLRAILQNQGN

SEQ ID NO: 417 - protein, 199 aa, synthetic construct
MEASPASGPRHLMDPHIFYSNFNNGIGRHKTYLIYEVERLDNGTSVKMDQHRGFLHNQAKNLLCGFYGRHAELLFLDLVPSLQLDPAQIYRVTWFISWSPCFSWGCAGEVRAFLQENTHVRLRIFAARIADHWPLYKEALQMLRDAGAQVSIMTYDEFKHCWDTFVDHQGAPFQPWDGLDEHSQALSGRLRAILQNQGN

SEQ ID NO: 418 - protein, 199 aa, synthetic construct
MEASPASGPRHLMDPHIFYSNFNNGIGRHKTYLCYEVERLDNGTSVKMDQHRGFLHNQPKNLLCGFYGRHAELLFLDLVPSLQLDPAQIYRVTWFISWSPCFSWGCAGEVRAFLQENTHVRLRIFAARIADHWPLYKEALQMLRDAGAQVSIMTYDEFKHCWDTFVDHQGAPFQPWDGLDEHSQALSGRLRAILQNQGN

SEQ ID NO: 419 - protein, 199 aa, synthetic construct
MEASPASGPRHLMDPHIFYSNFNNGIGRHKTYLCYEVERLDNGTSVKMDQHRGFLHNQAKNPLCGFYGRHAELLFLDLVPSLQLDPAQIYRVTWFISWSPCFSWGCAGEVRAFLQENTHVRLRIFAARIADHWPLYKEALQMLRDAGAQVSIMTYDEFKHCWDTFVDHQGAPFQPWDGLDEHSQALSGRLRAILQNQGN

SEQ ID NO: 420 - protein, 199 aa, synthetic construct
MEASPASGPRHLMDPHIFYSNFNNGIGRHKTYLCYEVERLDNGTSVKMDQHRGFLHNQAKNLLCGFYGRHAELIFLDLVPSLQLDPAQIYRVTWFISWSPCFSWGCAGEVRAFLQENTHVRLRIFAARIADHWPLYKEALQMLRDAGAQVSIMTYDEFKHCWDTFVDHQGAPFQPWDGLDEHSQALSGRLRAILQNQGN

SEQ ID NO: 421 - protein, 199 aa, synthetic construct
MEASPASGPRHLMDPHIFYSNFNNGIGRHKTYLCYEVERLDNGTSVKMDQHRGFLHNQAKNLLCGFYGRHAELLFLDLLPSLQLDPAQIYRVTWFISWSPCFSWGCAGEVRAFLQENTHVRLRIFAARIADHWPLYKEALQMLRDAGAQVSIMTYDEFKHCWDTFVDHQGAPFQPWDGLDEHSQALSGRLRAILQNQGN

SEQ ID NO: 422 - protein, 199 aa, synthetic construct
MEASPASGPRHLMDPHIFYSNFNNGIGRHKTYLCYEVERLDNGTSVKMDQHRGFLHNQAKNLLCGFYGRHAELLFLDLVKSLQLDPAQIYRVTWFISWSPCFSWGCAGEVRAFLQENTHVRLRIFAARIADHWPLYKEALQMLRDAGAQVSIMTYDEFKHCWDTFVDHQGAPFQPWDGLDEHSQALSGRLRAILQNQGN

SEQ ID NO: 423 - protein, 199 aa, synthetic construct
MEASPASGPRHLMDPHIFYSNFNNGIGRHKTYLCYEVERLDNGTSVKMDQHRGFLHNQAKNLLCGFYGRHAELLFLDLVLSLQLDPAQIYRVTWFISWSPCFSWGCAGEVRAFLQENTHVRLRIFAARIADHWPLYKEALQMLRDAGAQVSIMTYDEFKHCWDTFVDHQGAPFQPWDGLDEHSQALSGRLRAILQNQGN

SEQ ID NO: 424 - protein, 199 aa, synthetic construct
MEASPASGPRHLMDPHIFYSNFNNGIGRHKTYLCYEVERLDNGTSVKMDQHRGFLHNQAKNLLCGFYGRHAELLFLDLVWSLQLDPAQIYRVTWFISWSPCFSWGCAGEVRAFLQENTHVRLRIFAARIADHWPLYKEALQMLRDAGAQVSIMTYDEFKHCWDTFVDHQGAPFQPWDGLDEHSQALSGRLRAILQNQGN

SEQ ID NO: 425 - protein, 199 aa, synthetic construct
MEASPASGPRHLMDPHIFYSNFNNGIGRHKTYLCYEVERLDNGTSVKMDQHRGFLHNQAKNLLCGFYGRHAELLFLDLVRSLQLDPAQIYRVTWFISWSPCFSWGCAGEVRAFLQENTHVRLRIFAARIADHWPLYKEALQMLRDAGAQVSIMTYDEFKHCWDTFVDHQGAPFQPWDGLDEHSQALSGRLRAILQNQGN

SEQ ID NO: 426 - protein, 199 aa, synthetic construct
MEASPASGPRHLMDPHIFYSNFNNGIGRHKTYLCYEVERLDNGTSVKMDQHRGFLHNQAKNLLCGFYGRHAELLFLDLVFSLQLDPAQIYRVTWFISWSPCFSWGCAGEVRAFLQENTHVRLRIFAARIADHWPLYKEALQMLRDAGAQVSIMTYDEFKHCWDTFVDHQGAPFQPWDGLDEHSQALSGRLRAILQNQGN

SEQ ID NO: 427 - protein, 199 aa, synthetic construct
MEASPASGPRHLMDPHIFYSNFNNGIGRHKTYLCYEVERLDNGTSVKMDQHRGFLHNQAKNLLCGFYGRHAELLFLDLVESLQLDPAQIYRVTWFISWSPCFSWGCAGEVRAFLQENTHVRLRIFAARIADHWPLYKEALQMLRDAGAQVSIMTYDEFKHCWDTFVDHQGAPFQPWDGLDEHSQALSGRLRAILQNQGN

SEQ ID NO: 428 - protein, 199 aa, synthetic construct
MEASPASGPRHLMDPHIFYSNFNNGIGRHKTYLCYEVERLDNGTSVKMDQHRGFLHNQAKNLLCGFYGRHAELLFLDLVYSLQLDPAQIYRVTWFISWSPCFSWGCAGEVRAFLQENTHVRLRIFAARIADHWPLYKEALQMLRDAGAQVSIMTYDEFKHCWDTFVDHQGAPFQPWDGLDEHSQALSGRLRAILQNQGN

SEQ ID NO: 429 - protein, 199 aa, synthetic construct
MEASPASGPRHLMDPHIFYSNFNNGIGRHKTYLCYEVERLDNGTSVKMDQHRGFLHNQAKNLLCGFYGRHAELLFLDLVDSLQLDPAQIYRVTWFISWSPCFSWGCAGEVRAFLQENTHVRLRIFAARIADHWPLYKEALQMLRDAGAQVSIMTYDEFKHCWDTFVDHQGAPFQPWDGLDEHSQALSGRLRAILQNQGN

SEQ ID NO: 430 - protein, 199 aa, synthetic construct
MEASPASGPRHLMDPHIFYSNFNNGIGRHKTYLCYEVERLDNGTSVKMDQHRGFLHNQAKNLLCGFYGRHAELLFLDLVHSLQLDPAQIYRVTWFISWSPCFSWGCAGEVRAFLQENTHVRLRIFAARIADHWPLYKEALQMLRDAGAQVSIMTYDEFKHCWDTFVDHQGAPFQPWDGLDEHSQALSGRLRAILQNQGN

SEQ ID NO: 431 - protein, 199 aa, synthetic construct
MEASPASGPRHLMDPHIFYSNFNNGIGRHKTYLCYEVERLDNGTSVKMDQHRGFLHNQAKNLLCGFYGRHAELLFLDLVQSLQLDPAQIYRVTWFISWSPCFSWGCAGEVRAFLQENTHVRLRIFAARIADHWPLYKEALQMLRDAGAQVSIMTYDEFKHCWDTFVDHQGAPFQPWDGLDEHSQALSGRLRAILQNQGN

SEQ ID NO: 432 - protein, 199 aa, synthetic construct
MEASPASGPRHLMDPHIFYSNFNNGIGRHKTYLCYEVERLDNGTSVKMDQHRGFLHNQAKNLLCGFYGRHAELLFLDLVTSLQLDPAQIYRVTWFISWSPCFSWGCAGEVRAFLQENTHVRLRIFAARIADHWPLYKEALQMLRDAGAQVSIMTYDEFKHCWDTFVDHQGAPFQPWDGLDEHSQALSGRLRAILQNQGN

SEQ ID NO: 433 - protein, 199 aa, synthetic construct
MEASPASGPRHLMDPHIFYSNFNNGIGRHKTYLCYEVERLDNGTSVKMDQHRGFLHNQAKNLLCGFYGRHAELLFLDLVVSLQLDPAQIYRVTWFISWSPCFSWGCAGEVRAFLQENTHVRLRIFAARIADHWPLYKEALQMLRDAGAQVSIMTYDEFKHCWDTFVDHQGAPFQPWDGLDEHSQALSGRLRAILQNQGN

SEQ ID NO: 434 - protein, 199 aa, synthetic construct
MEASPASGPRHLMDPHIFYSNFNNGIGRHKTYLCYEVERLDNGTSVKMDQHRGFLHNQAKNLLCGFYGRHAELLFLDLVPSLQLDPRQIYRVTWFISWSPCFSWGCAGEVRAFLQENTHVRLRIFAARIADHWPLYKEALQMLRDAGAQVSIMTYDEFKHCWDTFVDHQGAPFQPWDGLDEHSQALSGRLRAILQNQGN

SEQ ID NO: 435 - protein, 199 aa, synthetic construct
MEASPASGPRHLMDPHIFYSNFNNGIGRHKTYLCYEVERLDNGTSVKMDQHRGFLHNQAKNLLCGFYGRHAELLFLDLVPSLQLDPAQIYRVTWFISWSPCFFWGCAGEVRAFLQENTHVRLRIFAARIADHWPLYKEALQMLRDAGAQVSIMTYDEFKHCWDTFVDHQGAPFQPWDGLDEHSQALSGRLRAILQNQGN

SEQ ID NO: 436 - protein, 199 aa, synthetic construct
MEASPASGPRHLMDPHIFYSNFNNGIGRHKTYLCYEVERLDNGTSVKMDQHRGFLHNQAKNLLCGFYGRHAELLFLDLVPSLQLDPAQIYRVTWFISWSPCFYWGCAGEVRAFLQENTHVRLRIFAARIADHWPLYKEALQMLRDAGAQVSIMTYDEFKHCWDTFVDHQGAPFQPWDGLDEHSQALSGRLRAILQNQGN

SEQ ID NO: 437 - protein, 199 aa, synthetic construct
MEASPASGPRHLMDPHIFYSNFNNGIGRHKTYLCYEVERLDNGTSVKMDQHRGFLHNQAKNLLCGFYGRHAELLFLDLVPSLQLDPAQIYRVTWFISWSPCFSWGCAEEVRAFLQENTHVRLRIFAARIADHWPLYKEALQMLRDAGAQVSIMTYDEFKHCWDTFVDHQGAPFQPWDGLDEHSQALSGRLRAILQNQGN

SEQ ID NO: 438 - protein, 199 aa, synthetic construct
MEASPASGPRHLMDPHIFYSNFNNGIGRHKTYLCYEVERLDNGTSVKMDQHRGFLHNQAKNLLCGFYGRHAELLFLDLVPSLQLDPAQIYRVTWFISWSPCFSWGCADEVRAFLQENTHVRLRIFAARIADHWPLYKEALQMLRDAGAQVSIMTYDEFKHCWDTFVDHQGAPFQPWDGLDEHSQALSGRLRAILQNQGN

SEQ ID NO: 439 - protein, 199 aa, synthetic construct
MEASPASGPRHLMDPHIFYSNFNNGIGRHKTYLCYEVERLDNGTSVKMDQHRGFLHNQAKNLLCGFYGRHAELLFLDLVPSLQLDPAQIYRVTWFISWSPCFSWGCAQEVRAFLQENTHVRLRIFAARIADHWPLYKEALQMLRDAGAQVSIMTYDEFKHCWDTFVDHQGAPFQPWDGLDEHSQALSGRLRAILQNQGN

SEQ ID NO: 440 - protein, 199 aa, synthetic construct
MEASPASGPRHLMDPHIFYSNFNNGIGRHKTYLCYEVERLDNGTSVKMDQHRGFLHNQAKNLLCGFYGRHAELLFLDLVPSLQLDPAQIYRVTWFISWSPCFSWGCAYEVRAFLQENTHVRLRIFAARIADHWPLYKEALQMLRDAGAQVSIMTYDEFKHCWDTFVDHQGAPFQPWDGLDEHSQALSGRLRAILQNQGN

SEQ ID NO: 441 - protein, 199 aa, synthetic construct
MEASPASGPRHLMDPHIFYSNFNNGIGRHKTYLCYEVERLDNGTSVKMDQHRGFLHNQAKNLLCGFYGRHAELLFLDLVPSLQLDPAQIYRVTWFISWSPCFSWGCAHEVRAFLQENTHVRLRIFAARIADHWPLYKEALQMLRDAGAQVSIMTYDEFKHCWDTFVDHQGAPFQPWDGLDEHSQALSGRLRAILQNQGN

SEQ ID NO: 442 - protein, 199 aa, synthetic construct
MEASPASGPRHLMDPHIFYSNFNNGIGRHKTYLCYEVERLDNGTSVKMDQHRGFLHNQAKNLLCGFYGRHAELLFLDLVPSLQLDPAQIYRVTWFISWSPCFSWGCALEVRAFLQENTHVRLRIFAARIADHWPLYKEALQMLRDAGAQVSIMTYDEFKHCWDTFVDHQGAPFQPWDGLDEHSQALSGRLRAILQNQGN

SEQ ID NO: 443 - protein, 199 aa, synthetic construct
MEASPASGPRHLMDPHIFYSNFNNGIGRHKTYLCYEVERLDNGTSVKMDQHRGFLHNQAKNLLCGFYGRHAELLFLDLVPSLQLDPAQIYRVTWFISWSPCFSWGCAKEVRAFLQENTHVRLRIFAARIADHWPLYKEALQMLRDAGAQVSIMTYDEFKHCWDTFVDHQGAPFQPWDGLDEHSQALSGRLRAILQNQGN

SEQ ID NO: 444 - protein, 199 aa, synthetic construct
MEASPASGPRHLMDPHIFYSNFNNGIGRHKTYLCYEVERLDNGTSVKMDQHRGFLHNQAKNLLCGFYGRHAELLFLDLVPSLQLDPAQIYRVTWFISWSPCFSWGCAREVRAFLQENTHVRLRIFAARIADHWPLYKEALQMLRDAGAQVSIMTYDEFKHCWDTFVDHQGAPFQPWDGLDEHSQALSGRLRAILQNQGN

SEQ ID NO: 445 - protein, 199 aa, synthetic construct
MEASPASGPRHLMDPHIFYSNFNNGIGRHKTYLCYEVERLDNGTSVKMDQHRGFLHNQAKNLLCGFYGRHAELLFLDLVPSLQLDPAQIYRVTWFISWSPCFSWGCAGEVRAFLQENTHVRLRIFVARIADHWPLYKEALQMLRDAGAQVSIMTYDEFKHCWDTFVDHQGAPFQPWDGLDEHSQALSGRLRAILQNQGN

SEQ ID NO: 446 - protein, 199 aa, synthetic construct
MEASPASGPRHLMDPHIFYSNFNNGIGRHKTYLCYEVERLDNGTSVKMDQHRGFLHNQAKNLLCGFYGRHAELLFLDLVPSLQLDPAQIYRVTWFISWSPCFSWGCAGEVRAFLQENTHVRLRIFAARIADHWPLYKEALQMLRDAGAQVSIMTYDWFKHCWDTFVDHQGAPFQPWDGLDEHSQALSGRLRAILQNQGN

SEQ ID NO: 447 - protein, 199 aa, synthetic construct
MEASPASGPRHLMDPHIFYSNFNNGIGRHKTYLCYEVERLDNGTSVKMDQHRGFLHNQAKNLLCGFYGRHAELLFLDLVPSLQLDPAQIYRVTWFISWSPCFSWGCAGEVRAFLQENTHVRLRIFAARIADHWPLYKEALQMLRDAGAQVSIMTYDEFKHVWDTFVDHQGAPFQPWDGLDEHSQALSGRLRAILQNQGN

SEQ ID NO: 448 - protein, 199 aa, synthetic construct
MEASPASGPRHLMDPHIFYSNFNNGIGRHKTYLCYEVERLDNGTSVKMDQHRGFLHNQAKNLLCGFYGRHAELLFLDLVPSLQLDPAQIYRVTWFISWSPCFSWGCAGEVRAFLQENTHVRLRIFAARIADHWPLYKEALQMLRDAGAQVSIMTYDEFKHIWDTFVDHQGAPFQPWDGLDEHSQALSGRLRAILQNQGN

SEQ ID NO: 449 - protein, 199 aa, synthetic construct
MEASPASGPRHLMDPHIFYSNFNNGIGRHKTYLCYEVERLDNGTSVKMDQHRGFLHNQAKNLLCGFYGRHAELLFLDLVPSLQLDPAQIYRVTWFISWSPCFSWGCAGEVRAFLQENTHVRLRIFAARIADHWPLYKEALQMLRDAGAQVSIMTYDEFKHLWDTFVDHQGAPFQPWDGLDEHSQALSGRLRAILQNQGN

SEQ ID NO: 450 - protein, 199 aa, synthetic construct
MEASPASGPRHLMDPHIFYSNFNNGIGRHKTYLCYEVERLDNGTSVKMDQHRGFLHNQAKNLLCGFYGRHAELLFLDLVPSLQLDPAQIYRVTWFISWSPCFSWGCAGEVRAFLQENTHVRLRIFAARIADHWPLYKEALQMLRDAGAQVSIMTYDEFKHCWDIFVDHQGAPFQPWDGLDEHSQALSGRLRAILQNQGN

SEQ ID NO: 451 - protein, 199 aa, synthetic construct
MEASPASGPRHLMDPHIFYSNFNNGIGRHKTYLCYEVERLDNGTSVKMDQHRGFLHNQAKNLLCGFYGRHAELLFLDLVPSLQLDPAQIYRVTWFISWSPCFSWGCAGEVRAFLQENTHVRLRIFAARIADHWPLYKEALQMLRDAGAQVSIMTYDEFKHCWDTFVDHQGIPFQPWDGLDEHSQALSGRLRAILQNQGN

SEQ ID NO: 452 - protein, 199 aa, synthetic construct
MEASPASGPRHLMDPHIFYSNFNNGIGRHKTYLCYEVERLDNGTSVKMDQHRGFLHNQAKNLLCGFYGRHAELLFLDLVPSLQLDPAQIYRVTWFISWSPCFSWGCAGEVRAFLQENTHVRLRIFAARIADHWPLYKEALQMLRDAGAQVSIMTYDEFKHCWDTFVDHQGAPFQPWDGLDEHYQALSGRLRAILQNQGN

SEQ ID NO: 453 - protein, 199 aa, synthetic construct
MEASPASGPRHLMDPHIFYSNFNNGIGRHKTYLCYEVERLDNGTSVKMDQHRGFLHNQAKNLLCGFYGRHAELLFLDLVPSLQLDPAQIYRVTWFISWSPCFSWGCAGEVRAFLQENTHVRLRIFAARIADHWPLYKEALQMLRDAGAQVSIMTYDEFKHCWDTFVDHQGAPFQPWDGLDEHFQALSGRLRAILQNQGN

SEQ ID NO: 454 - protein, 199 aa, synthetic construct
MEASPASGPRHLMDPHIFYSNFNNGIGRHKTYLCYEVERLDNGTSVKMDQHRGFLHNQAKNLLCGFYGRHAELLFLDLVPSLQLDPAQIYRVTWFISWSPCFSWGCAGEVRAFLQENTHVRLRIFAARIADHWPLYKEALQMLRDAGAQVSIMTYDEFKHCWDTFVDHQGAPFQPWDGLDEHWQALSGRLRAILQNQGN

SEQ ID NO: 455 - protein, 199 aa, synthetic construct
MEASPASGPRHLMDPHIFYSNFNNGIGRHKTYLCYEVERLDNGTSVKMDQHRGFLHNQAKNLLCGFYGRHAELLFLDLVPSLQLDPAQIYRVTWFISWSPCFSWGCAGEVRAFLQENTHVRLRIFAARIADHWPLYKEALQMLRDAGAQVSIMTYDEFKHCWDTFVDHQGAPFQPWDGLDEHSQHLSGRLRAILQNQGN

SEQ ID NO: 456 - protein, 199 aa, synthetic construct
MEASPASGPRHLMDPHIFYSNFNNGIGRHKTYLCYEVERLDNGTSVKMDQHRGFLHNQAKNLLCGFYGRHAELLFLDLVPSLQLDPAQIYRVTWFISWSPCFSWGCAGEVRAFLQENTHVRLRIFAARIADHWPLYKEALQMLRDAGAQVSIMTYDEFKHCWDTFVDHQGAPFQPWDGLDEHSQILSGRLRAILQNQGN

SEQ ID NO: 457 - protein, 199 aa, synthetic construct
MEASPASGPRHLMDPHIFYSNFNNGIGRHKTYLCYEVERLDNGTSVKMDQHRGFLHNQAKNLLCGFYGRHAELLFLDLVPSLQLDPAQIYRVTWFISWSPCFSWGCAGEVRAFLQENTHVRLRIFAARIADHWPLYKEALQMLRDAGAQVSIMTYDEFKHCWDTFVDHQGAPFQPWDGLDEHSQALIGRLRAILQNQGN

SEQ ID NO: 458 - protein, 199 aa, synthetic construct
MEASPASGPRHLMDPHIFYSNFNNGIGRHKTYLCYEVERLDNGTSVKMDQHRGFLHNQAKNLLCGFYGRHAELLFLDLVPSLQLDPAQIYRVTWFISWSPCFSWGCAGEVRAFLQENTHVRLRIFAARIADHWPLYKEALQMLRDAGAQVSIMTYDEFKHCWDTFVDHQGAPFQPWDGLDEHSQALWGRLRAILQNQGN

SEQ ID NO: 459 - protein, 199 aa, synthetic construct
MEASPASGPRHLMDPHIFYSNFNNGIGRHKTYLCYEVERLDNGTSVKMDQHRGFLHNQAKNLLCGFYGRHAELLFLDLVPSLQLDPAQIYRVTWFISWSPCFSWGCAGEVRAFLQENTHVRLRIFAARIADHWPLYKEALQMLRDAGAQVSIMTYDEFKHCWDTFVDHQGAPFQPWDGLDEHSQALSLRLRAILQNQGN

SEQ ID NO: 460 - protein, 199 aa, synthetic construct
MEASPASGPRHLMDPHIFYSNFNNGIGRHKTYLCYEVERLDNGTSVKMDQHRGFLHNQAKNLLCGFYGRHAELLFLDLVPSLQLDPAQIYRVTWFISWSPCFSWGCAGEVRAFLQENTHVRLRIFAARIADHWPLYKEALQMLRDAGAQVSIMTYDEFKHCWDTFVDHQGAPFQPWDGLDEHSQALSGRLRAILQPQGN

SEQ ID NO: 461 - protein, 199 aa, synthetic construct
MEASPASGPRHLMDPHIFYSNFNNGIGRHKTYLCYEVERLDNGTSVKMDQHRGFLHNQAPNLLCGFYGRHAELLFLDLVPSLQLDPAQIYRVTWFISWSPCFSWGCAGEVRAFLQENTHVRLRIFAARIADHWPLYKEALQMLRDAGAQVSIMTYDEFKHCWDTFVDHQGAPFQPWDGLDEHSQALSGRLRAILQNQGN

SEQ ID NO: 462 - protein, 199 aa, synthetic construct
MEASPASGPRHLMDPHIFYSNFNNGIGRHKTYLCYEVERLDNGTSVKMDQHRGFLHNQAKNLLCGFYGRHAELLFLDLVPSLQLDPAQIYRVTWFISWSPCFSWGCAGEVRAFLQENTHVRLRIFAARIADHWPLYKEALQMLRDAGAQVSIMTYDEFKHMWDTFVDHQGAPFQPWDGLDEHSQALSGRLRAILQNQGN

SEQ ID NO: 463 - protein, 199 aa, synthetic construct
MEASPASGPRHLMDPHIFYSNFNNGIGRHKTYLCYEVERLDNGTSVKMDQHRGFLHNQAKNLLCGFYGRHAELLFLDLVPSLQLDPAQIYRVTWFISWSPCFSWGCAGEVRAFLQENTHVRLRIFAARIADHWPLYKEALQMLRDAGAQVSIMTYDEFKHCWDTFVDHQGAPFQPWDGLDEHSQFLSGRLRAILQNQGN

SEQ ID NO: 464 - protein, 199 aa, synthetic construct
MEASPASGPRHLMDPHIFYSNFNNGIGRHKTYLCYEVERLDNGTSVKMDQHRGFLHNQAKNLLCGFYGRHAELLFLDLVPSLQLDPAQIYRVTWFISWSPCFSWGCAMEVRAFLQENTHVRLRIFAARIADHWPLYKEALQMLRDAGAQVSIMTYDEFKHCWDTFVDHQGAPFQPWDGLDEHSQALSGRLRAILQNQGN

SEQ ID NO: 465 - protein, 199 aa, synthetic construct
MEASPASGPRHLMDPHIFYSNFNNGIGRHKTYLCYEVERLDNGTSVKMDQHRGFLHNQAKNLLCGFYGRHAELLFLDLVPSLQLDPAQIYRVIWFISWSPCFSWGCAGEVRAFLQENTHVRLRIFAARIADHWPLYKEALQMLRDAGAQVSIMTYDEFKHCWDTFVDHQGAPFQPWDGLDEHSQALSGRLRAILQNQGN

SEQ ID NO: 466 - protein, 199 aa, synthetic construct
MEASPASGPRHLMDPHIFYSNFNNGIGRHKTYLCYEVERLDNGTSVKMDQHRGFLHNQAKNLLCGFYGRHAELLFLDLVPSLQLDPAQIYRVTWFISWSPCFSWGCAGEVRAFLQEWTHVRLRIFAARIADHWPLYKEALQMLRDAGAQVSIMTYDEFKHCWDTFVDHQGAPFQPWDGLDEHSQALSGRLRAILQNQGN

SEQ ID NO: 467 - protein, 199 aa, synthetic construct
MEASPASGPRHLMDPHIFYSNFNNGIGRHKTYLCYEVERLDNGTSVKMDQHRGFLHDQAKNLLCGFYGRHAELLFLDLVPSLQLDPAQIYRVTWFISWSPCFSWGCAGEVRAFLQENTHVRLRIFAARIADHWPLYKEALQMLRDAGAQVSIMTYDEFKHCWDTFVDHQGAPFQPWDGLDEHSQALSGRLRAILQNQGN

SEQ ID NO: 468 - protein, 199 aa, synthetic construct
MEASPASGPRHLMDPHIFYSNFNNGIGRHKTYLCYEVERLDNGTSVKMDQHRGFLHNQAKNLLCGFYGRHAELLFLDLVPSLQLDPAQIYRVTWFISWSPCFSWGCAWEVRAFLQENTHVRLRIFAARIADHWPLYKEALQMLRDAGAQVSIMTYDEFKHCWDTFVDHQGAPFQPWDGLDEHSQALSGRLRAILQNQGN

SEQ ID NO: 469 - protein, 199 aa, synthetic construct
MEASPASGPRHLMDPHIFYSNFNNGIGRHKFYLCYEVERLDNGTSVKMDQHRGFLHNQAKNLLCGFYGRHAELLFLDLVPSLQLDPAQIYRVTWFISWSPCFSWGCAGEVRAFLQENTHVRLRIFAARIADHWPLYKEALQMLRDAGAQVSIMTYDEFKHCWDTFVDHQGAPFQPWDGLDEHSQALSGRLRAILQNQGN

SEQ ID NO: 470 - protein, 199 aa, synthetic construct
MEASPASGPRLLMDPHIFYSNFNNGIGRHKTYLCYEVERLDNGTSVKMDQHRGFLHNQAKNLLCGFYGRHAELLFLDLVPSLQLDPAQIYRVTWFISWSPCFSWGCAGEVRAFLQENTHVRLRIFAARIADHWPLYKEALQMLRDAGAQVSIMTYDEFKHCWDTFVDHQGAPFQPWDGLDEHSQALSGRLRAILQNQGN

SEQ ID NO: 471 - protein, 199 aa, synthetic construct
MEASPASGPRHLMDPHIFYSNFNNGIGRHKTYLCYEVERLDNGTSVKMDQHRGFLHNQAKNLLCGFYGRHAELLFLDLVPSLQLDPAQIYRVTWFISWSPCFSWGCAGEVRAFLQENTWVRLRIFAARIADHWPLYKEALQMLRDAGAQVSIMTYDEFKHCWDTFVDHQGAPFQPWDGLDEHSQALSGRLRAILQNQGN

SEQ ID NO: 472 - protein, 199 aa, synthetic construct
MEASPASGPRHLMDPHIFYSNFNNGIGRHKTYLCYEVERLDNGTSVKMDQHRGFLHNQAKNLLCGFYGRHAELLFLDLVPSLQLDPAQIYRVTWFISWSPCFSWGCAGEVRAFLQENPHVRLRIFAARIADHWPLYKEALQMLRDAGAQVSIMTYDEFKHCWDTFVDHQGAPFQPWDGLDEHSQALSGRLRAILQNQGN

SEQ ID NO: 473 - protein, 199 aa, synthetic construct
MEASPASGPRHLMDPHIFYSNFNNGIGRHKTYLCYEVELLDNGTSVKMDQHRGFLHNQAKNLLCGFYGRHAELLFLDLVPSLQLDPAQIYRVTWFISWSPCFSWGCAGEVRAFLQENTHVRLRIFAARIADHWPLYKEALQMLRDAGAQVSIMTYDEFKHCWDTFVDHQGAPFQPWDGLDEHSQALSGRLRAILQNQGN

SEQ ID NO: 474 - protein, 199 aa, synthetic construct
MEASPASGPRHLMDPHIFYSNFNNGIGRHKTYLCYEVERLDNGTSVKMDQHRGFLHNQAKNLLCGFYGRHAELLFLDLVPSLQLDPAQIYRVTWFISWSPCFSWGIAGEVRAFLQENTHVRLRIFAARIADHWPLYKEALQMLRDAGAQVSIMTYDEFKHCWDTFVDHQGAPFQPWDGLDEHSQALSGRLRAILQNQGN

SEQ ID NO: 475 - protein, 199 aa, synthetic construct
MEASPASGPRHLMDPHIFYSNFNNGIGRHKTYLCYEVERLDNGTSVKMDQHRGFLHNQAKNLLCGFYGRHAELLFLDLVPSLQLDPAQIYRVTWFISWSPCFHWGCAGEVRAFLQENTHVRLRIFAARIADHWPLYKEALQMLRDAGAQVSIMTYDEFKHCWDTFVDHQGAPFQPWDGLDEHSQALSGRLRAILQNQGN

SEQ ID NO: 476 - protein, 199 aa, synthetic construct
MEASPASGPRHLMDPHIFYSNFNNGIGRHKTYLCYEVERLDNGTSVKMDQHRGFLHNQAKNLLCGFYGRHAELLFLDLVPSLQLDPAQIYRVTWFISWSPCFSWGCAGEVRAFLQENTHVRLRIFAARIADHWPLYKEALQMLRDAGAQVSIMTYDEFKHCWDTFVDHQGAPFQPWDGLDEHSQALEGRLRAILQNQGN

SEQ ID NO: 477 - protein, 199 aa, synthetic construct
MEASPASGPRHLMDPHIFYSNFNNGIGRHKTYLCYEVERLDNGTSVKMDQHRGFLHNQAKNLLCGFYGRHAELLFLDLVPSLQLDPAQIYRVTWFISWSPCFSWGCAGEVRAFLQENTHVRLRIFFARIADHWPLYKEALQMLRDAGAQVSIMTYDEFKHCWDTFVDHQGAPFQPWDGLDEHSQALSGRLRAILQNQGN

SEQ ID NO: 478 - protein, 199 aa, synthetic construct
MEASPASGPRHLMDPHIFYSNFNNGILRHKTYLCYEVERLDNGTSVKMDQHRGFLHNQAKNLLCGFYGRHAELLFLDLVPSLQLDPAQIYRVTWFISWSPCFSWGCAGEVRAFLQENTHVRLRIFAARIADHWPLYKEALQMLRDAGAQVSIMTYDEFKHCWDTFVDHQGAPFQPWDGLDEHSQALSGRLRAILQNQGN

SEQ ID NO: 479 - protein, 199 aa, synthetic construct
MEASPASGPRHLMDPHIFYSNFNNGIGRHKTYLCYEVERLDNGTSVPMDQHRGFLHNQAKNLLCGFYGRHAELLFLDLVPSLQLDPAQIYRVTWFISWSPCFSWGCAGEVRAFLQENTHVRLRIFAARIADHWPLYKEALQMLRDAGAQVSIMTYDEFKHCWDTFVDHQGAPFQPWDGLDEHSQALSGRLRAILQNQGN

SEQ ID NO: 480 - protein, 199 aa, synthetic construct
MEASPASGPRHLMDPHIFYSNFNNGIGRHKWYLCYEVERLDNGTSVKMDQHRGFLHNQAKNLLCGFYGRHAELLFLDLVPSLQLDPAQIYRVTWFISWSPCFSWGCAGEVRAFLQENTHVRLRIFAARIADHWPLYKEALQMLRDAGAQVSIMTYDEFKHCWDTFVDHQGAPFQPWDGLDEHSQALSGRLRAILQNQGN

SEQ ID NO: 481 - protein, 199 aa, synthetic construct
MEASPASGPRHLMDPHIFYSNFNNGIGRHKTYLCYEVERLDNGTSVKMDQHRGFLHNQAKNLLCGFYGRHAELLFLDLVPSLQLDPAQIYRVTWFISWSPCFRWGCAGEVRAFLQENTHVRLRIFAARIADHWPLYKEALQMLRDAGAQVSIMTYDEFKHCWDTFVDHQGAPFQPWDGLDEHSQALSGRLRAILQNQGN

SEQ ID NO: 482 - protein, 199 aa, synthetic construct
MEASPASGPRHLMDPHIFYSNFNNGIGRHKTYLCYEVERLDNGTSVKMDQHRGFLHNQAKNLLCGFYGRHAELLFLDLVPSLQLDPAQIYRVTWFISWSPCFSWGCAGEVRAFLQENTHVRLRIFIARIADHWPLYKEALQMLRDAGAQVSIMTYDEFKHCWDTFVDHQGAPFQPWDGLDEHSQALSGRLRAILQNQGN

SEQ ID NO: 483 - protein, 199 aa, synthetic construct
MEASPASGPRHLMDPHIFYSNFNNGIGRHKTYLCYEVERLDNGTSVKMDQHRGFLHNQAKNLLCGFYGRHAELLFLDLVPSLQLDPAQIYRVTWFISWSPCFSWLCAGEVRAFLQENTHVRLRIFAARIADHWPLYKEALQMLRDAGAQVSIMTYDEFKHCWDTFVDHQGAPFQPWDGLDEHSQALSGRLRAILQNQGN

SEQ ID NO: 484 - protein, 199 aa, synthetic construct
MEASPASGPRHLMDPHIFYSNFNNGIGRHKTYLCYEVERLDNGTSVKMDQHRGFLHNQAKNLLCGFYGRHAELLFLDLVPSLQLDPAQIYRVTWFISWSPCFSWGSAGEVRAFLQENTHVRLRIFAARIADHWPLYKEALQMLRDAGAQVSIMTYDEFKHCWDTFVDHQGAPFQPWDGLDEHSQALSGRLRAILQNQGN

SEQ ID NO: 485 - protein, 199 aa, synthetic construct
MEASPASGPRHLMDPHIFYSNFNNGIGRHKTYLCYEVERLDNGTSVKMDQHRGFLHNQAKNLLCGFYGRHAELLFLDLVPSLQLDPAQIYRVTWFISWSPCFSWGCAGEVRAFLQENTHVRLRIFLARIADHWPLYKEALQMLRDAGAQVSIMTYDEFKHCWDTFVDHQGAPFQPWDGLDEHSQALSGRLRAILQNQGN

SEQ ID NO: 486 - protein, 199 aa, synthetic construct
MEASPASGPRHLMDPHIFYSWFNNGIGRHKTYLCYEVERLDNGTSVKMDQHRGFLHNQAKNLLCGFYGRHAELLFLDLVPSLQLDPAQIYRVTWFISWSPCFSWGCAGEVRAFLQENTHVRLRIFAARIADHWPLYKEALQMLRDAGAQVSIMTYDEFKHCWDTFVDHQGAPFQPWDGLDEHSQALSGRLRAILQNQGN

SEQ ID NO: 487 - skipped

SEQ ID NO: 488 - protein, 199 aa, synthetic construct
MEASPASGPRHLMDPHIFYSNFNNGIGRHKTYLCYEVERLDNGTWVKMDQHRGFLHNQAKNLLCGFYGRHAELLFLDLVPSLQLDPAQIYRVTWFISWSPCFSWGCAGEVRAFLQENTHVRLRIFAARIADHWPLYKEALQMLRDAGAQVSIMTYDEFKHCWDTFVDHQGAPFQPWDGLDEHSQALSGRLRAILQNQGN

SEQ ID NO: 489 - protein, 199 aa, synthetic construct
MEASPASGPRHLMDPHIFYSNFNNRIGRHKTYLCYEVERLDNGTSVKMDQHRGFLHNQAKNLLCGFYGRHAELLFLDLVPSLQLDPAQIYRVTWFISWSPCFSWGCAGEVRAFLQENTHVRLRIFAARIADHWPLYKEALQMLRDAGAQVSIMTYDEFKHCWDTFVDHQGAPFQPWDGLDEHSQALSGRLRAILQNQGN

SEQ ID NO: 490 - protein, 199 aa, synthetic construct
MEASPASGPRHLMDPHIFYSNFNNRIGRHKTYLCYEVERLDNGTWVKMDQHRGFLHNQAKNLLCGFYGRHAELLFLDLVPSLQLDPAQIYRVTWFISWSPCFSWGCAGEVRAFLQENTHVRLRIFAARIADHWPLYKEALQMLRDAGAQVSIMTYDEFKHCWDTFVDHQGAPFQPWDGLDEHSQALSGRLRAILQNQGN

SEQ ID NO: 491 - protein, 199 aa, synthetic construct
MEASPASGPRHLMDPHIFYSNFNNKIGRHKTYLCYEVERLDNGTSVKMDQHRGFLHNQAKNLLCGFYGRHAELLFLDLVPSLQLDPAQIYRVTWFISWSPCFSWGCAGEVRAFLQENTHVRLRIFAARIADHWPLYKEALQMLRDAGAQVSIMTYDEFKHCWDTFVDHQGAPFQPWDGLDEHSQALSGRLRAILQNQGN

SEQ ID NO: 492 - protein, 199 aa, synthetic construct
MEASPASGPRHLMDPHIFYSNFNNKIGRHKTYLCYEVERLDNGTWVKMDQHRGFLHNQAKNLLCGFYGRHAELLFLDLVPSLQLDPAQIYRVTWFISWSPCFSWGCAGEVRAFLQENTHVRLRIFAARIADHWPLYKEALQMLRDAGAQVSIMTYDEFKHCWDTFVDHQGAPFQPWDGLDEHSQALSGRLRAILQNQGN

SEQ ID NO: 493 - protein, 199 aa, synthetic construct
MEASPASGPRHLMDPHIFYSNFNNGIGRHKTYLCYEVERLDNGTSVKMDQHRGFLHNQAKNLLCGFYGRHAELLFLDLVPSLQLDPAQIYRVTWFISWSPCFSWGCAGEVRAFLQENTHVRLRIFAARIADHWPLYKEALQMLRDAGAQVSIMTYDEFKHCWDTFVDHQGAPFQPWDGLDEHSQALSQRLRAILQNQGN

SEQ ID NO: 494 - protein, 199 aa, synthetic construct
MEASPASGPRHLMDPHIFYSNFNNGIGRHKTYLCYEVERLDNGTWVKMDQHRGFLHNQAKNLLCGFYGRHAELLFLDLVPSLQLDPAQIYRVTWFISWSPCFSWGCAGEVRAFLQENTHVRLRIFAARIADHWPLYKEALQMLRDAGAQVSIMTYDEFKHCWDTFVDHQGAPFQPWDGLDEHSQALSQRLRAILQNQGN

SEQ ID NO: 495 - protein, 199 aa, synthetic construct
MEASPASGPRHLMDPHIFYSNFNNRIGRHKTYLCYEVERLDNGTSVKMDQHRGFLHNQAKNLLCGFYGRHAELLFLDLVPSLQLDPAQIYRVTWFISWSPCFSWGCAGEVRAFLQENTHVRLRIFAARIADHWPLYKEALQMLRDAGAQVSIMTYDEFKHCWDTFVDHQGAPFQPWDGLDEHSQALSQRLRAILQNQGN

SEQ ID NO: 496 - protein, 199 aa, synthetic construct
MEASPASGPRHLMDPHIFYSNFNNRIGRHKTYLCYEVERLDNGTWVKMDQHRGFLHNQAKNLLCGFYGRHAELLFLDLVPSLQLDPAQIYRVTWFISWSPCFSWGCAGEVRAFLQENTHVRLRIFAARIADHWPLYKEALQMLRDAGAQVSIMTYDEFKHCWDTFVDHQGAPFQPWDGLDEHSQALSQRLRAILQNQGN

SEQ ID NO: 497 - protein, 199 aa, synthetic construct
MEASPASGPRHLMDPHIFYSNFNNKIGRHKTYLCYEVERLDNGTSVKMDQHRGFLHNQAKNLLCGFYGRHAELLFLDLVPSLQLDPAQIYRVTWFISWSPCFSWGCAGEVRAFLQENTHVRLRIFAARIADHWPLYKEALQMLRDAGAQVSIMTYDEFKHCWDTFVDHQGAPFQPWDGLDEHSQALSQRLRAILQNQGN

SEQ ID NO: 498 - protein, 199 aa, synthetic construct
MEASPASGPRHLMDPHIFYSNFNNKIGRHKTYLCYEVERLDNGTWVKMDQHRGFLHNQAKNLLCGFYGRHAELLFLDLVPSLQLDPAQIYRVTWFISWSPCFSWGCAGEVRAFLQENTHVRLRIFAARIADHWPLYKEALQMLRDAGAQVSIMTYDEFKHCWDTFVDHQGAPFQPWDGLDEHSQALSQRLRAILQNQGN

SEQ ID NO: 499 - protein, 199 aa, synthetic construct
MEASPASGPRHLMDPHIFYSNFNNGIGRHKTYLCYEVERLDNGTSVKMDQHRGFLHNQAKNLLCGFYGRHAELLFLDLVPSLQLDPAQIYRVTWFISWSPCFSWGCAGEVRAFLQENTHVRLRIFAARIADHWPLYKEALQMLRDAGAQVSIMTYDEFKHCWDTFVDHQGAPFQPWDGLDEHSQALSARLRAILQNQGN

SEQ ID NO: 500 - protein, 199 aa, synthetic construct
MEASPASGPRHLMDPHIFYSNFNNGIGRHKTYLCYEVERLDNGTWVKMDQHRGFLHNQAKNLLCGFYGRHAELLFLDLVPSLQLDPAQIYRVTWFISWSPCFSWGCAGEVRAFLQENTHVRLRIFAARIADHWPLYKEALQMLRDAGAQVSIMTYDEFKHCWDTFVDHQGAPFQPWDGLDEHSQALSARLRAILQNQGN

SEQ ID NO: 501 - protein, 199 aa, synthetic construct
MEASPASGPRHLMDPHIFYSNFNNRIGRHKTYLCYEVERLDNGTSVKMDQHRGFLHNQAKNLLCGFYGRHAELLFLDLVPSLQLDPAQIYRVTWFISWSPCFSWGCAGEVRAFLQENTHVRLRIFAARIADHWPLYKEALQMLRDAGAQVSIMTYDEFKHCWDTFVDHQGAPFQPWDGLDEHSQALSARLRAILQNQGN

SEQ ID NO: 502 - protein, 199 aa, synthetic construct
MEASPASGPRHLMDPHIFYSNFNNRIGRHKTYLCYEVERLDNGTWVKMDQHRGFLHNQAKNLLCGFYGRHAELLFLDLVPSLQLDPAQIYRVTWFISWSPCFSWGCAGEVRAFLQENTHVRLRIFAARIADHWPLYKEALQMLRDAGAQVSIMTYDEFKHCWDTFVDHQGAPFQPWDGLDEHSQALSARLRAILQNQGN

SEQ ID NO: 503 - protein, 199 aa, synthetic construct
MEASPASGPRHLMDPHIFYSNFNNKIGRHKTYLCYEVERLDNGTSVKMDQHRGFLHNQAKNLLCGFYGRHAELLFLDLVPSLQLDPAQIYRVTWFISWSPCFSWGCAGEVRAFLQENTHVRLRIFAARIADHWPLYKEALQMLRDAGAQVSIMTYDEFKHCWDTFVDHQGAPFQPWDGLDEHSQALSARLRAILQNQGN

SEQ ID NO: 504 - protein, 199 aa, synthetic construct
MEASPASGPRHLMDPHIFYSNFNNKIGRHKTYLCYEVERLDNGTWVKMDQHRGFLHNQAKNLLCGFYGRHAELLFLDLVPSLQLDPAQIYRVTWFISWSPCFSWGCAGEVRAFLQENTHVRLRIFAARIADHWPLYKEALQMLRDAGAQVSIMTYDEFKHCWDTFVDHQGAPFQPWDGLDEHSQALSARLRAILQNQGN

SEQ ID NO: 505 - protein, 199 aa, synthetic construct
MEASPASGPRHLMDPHIFYSNFNNGIGRHKTYLCYEVERLDNGTSVKMDQHRGFLHNQAKNLLCGFYGRHAELLFLDLVPSLQLDPAQIYRVTWFISWSPCFSWGCAGEVRAFLQENTHVRLRIFAARIADHWPLYKEALQMLRDAGAQVSIMTYDEFKHCWDTFVDHQGAPFQPWDGLDEHSQALSRRLRAILQNQGN

SEQ ID NO: 506 - protein, 199 aa, synthetic construct
MEASPASGPRHLMDPHIFYSNFNNGIGRHKTYLCYEVERLDNGTWVKMDQHRGFLHNQAKNLLCGFYGRHAELLFLDLVPSLQLDPAQIYRVTWFISWSPCFSWGCAGEVRAFLQENTHVRLRIFAARIADHWPLYKEALQMLRDAGAQVSIMTYDEFKHCWDTFVDHQGAPFQPWDGLDEHSQALSRRLRAILQNQGN

SEQ ID NO: 507 - protein, 199 aa, synthetic construct
MEASPASGPRHLMDPHIFYSNFNNRIGRHKTYLCYEVERLDNGTSVKMDQHRGFLHNQAKNLLCGFYGRHAELLFLDLVPSLQLDPAQIYRVTWFISWSPCFSWGCAGEVRAFLQENTHVRLRIFAARIADHWPLYKEALQMLRDAGAQVSIMTYDEFKHCWDTFVDHQGAPFQPWDGLDEHSQALSRRLRAILQNQGN

SEQ ID NO: 508 - protein, 199 aa, synthetic construct
MEASPASGPRHLMDPHIFYSNFNNRIGRHKTYLCYEVERLDNGTWVKMDQHRGFLHNQAKNLLCGFYGRHAELLFLDLVPSLQLDPAQIYRVTWFISWSPCFSWGCAGEVRAFLQENTHVRLRIFAARIADHWPLYKEALQMLRDAGAQVSIMTYDEFKHCWDTFVDHQGAPFQPWDGLDEHSQALSRRLRAILQNQGN

SEQ ID NO: 509 - protein, 199 aa, synthetic construct
MEASPASGPRHLMDPHIFYSNFNNKIGRHKTYLCYEVERLDNGTSVKMDQHRGFLHNQAKNLLCGFYGRHAELLFLDLVPSLQLDPAQIYRVTWFISWSPCFSWGCAGEVRAFLQENTHVRLRIFAARIADHWPLYKEALQMLRDAGAQVSIMTYDEFKHCWDTFVDHQGAPFQPWDGLDEHSQALSRRLRAILQNQGN

SEQ ID NO: 510 - protein, 199 aa, synthetic construct
MEASPASGPRHLMDPHIFYSNFNNKIGRHKTYLCYEVERLDNGTWVKMDQHRGFLHNQAKNLLCGFYGRHAELLFLDLVPSLQLDPAQIYRVTWFISWSPCFSWGCAGEVRAFLQENTHVRLRIFAARIADHWPLYKEALQMLRDAGAQVSIMTYDEFKHCWDTFVDHQGAPFQPWDGLDEHSQALSRRLRAILQNQGN

SEQ ID NO: 511 - protein, 199 aa, synthetic construct
MEASPASGPRHLMDPHIFYSNFNNGIGRHKTYLCYEVERLDNGTSVKMDQHRGFLHNQAKNLLCGFYGRHAELLFLDLVPSLQLDPAQIYRVTWFISWSPCFSWGCAAEVRAFLQENTHVRLRIFAARIADHWPLYKEALQMLRDAGAQVSIMTYDEFKHCWDTFVDHQGAPFQPWDGLDEHSQALSGRLRAILQNQGN

SEQ ID NO: 512 - protein, 199 aa, synthetic construct
MEASPASGPRHLMDPHIFYSNFNNGIGRHKTYLCYEVERLDNGTWVKMDQHRGFLHNQAKNLLCGFYGRHAELLFLDLVPSLQLDPAQIYRVTWFISWSPCFSWGCAAEVRAFLQENTHVRLRIFAARIADHWPLYKEALQMLRDAGAQVSIMTYDEFKHCWDTFVDHQGAPFQPWDGLDEHSQALSGRLRAILQNQGN

SEQ ID NO: 513 - protein, 199 aa, synthetic construct
MEASPASGPRHLMDPHIFYSNFNNRIGRHKTYLCYEVERLDNGTSVKMDQHRGFLHNQAKNLLCGFYGRHAELLFLDLVPSLQLDPAQIYRVTWFISWSPCFSWGCAAEVRAFLQENTHVRLRIFAARIADHWPLYKEALQMLRDAGAQVSIMTYDEFKHCWDTFVDHQGAPFQPWDGLDEHSQALSGRLRAILQNQGN

SEQ ID NO: 514 - protein, 199 aa, synthetic construct
MEASPASGPRHLMDPHIFYSNFNNRIGRHKTYLCYEVERLDNGTWVKMDQHRGFLHNQAKNLLCGFYGRHAELLFLDLVPSLQLDPAQIYRVTWFISWSPCFSWGCAAEVRAFLQENTHVRLRIFAARIADHWPLYKEALQMLRDAGAQVSIMTYDEFKHCWDTFVDHQGAPFQPWDGLDEHSQALSGRLRAILQNQGN

SEQ ID NO: 515 - protein, 199 aa, synthetic construct
MEASPASGPRHLMDPHIFYSNFNNKIGRHKTYLCYEVERLDNGTSVKMDQHRGFLHNQAKNLLCGFYGRHAELLFLDLVPSLQLDPAQIYRVTWFISWSPCFSWGCAAEVRAFLQENTHVRLRIFAARIADHWPLYKEALQMLRDAGAQVSIMTYDEFKHCWDTFVDHQGAPFQPWDGLDEHSQALSGRLRAILQNQGN

SEQ ID NO: 516 - protein, 199 aa, synthetic construct
MEASPASGPRHLMDPHIFYSNFNNKIGRHKTYLCYEVERLDNGTWVKMDQHRGFLHNQAKNLLCGFYGRHAELLFLDLVPSLQLDPAQIYRVTWFISWSPCFSWGCAAEVRAFLQENTHVRLRIFAARIADHWPLYKEALQMLRDAGAQVSIMTYDEFKHCWDTFVDHQGAPFQPWDGLDEHSQALSGRLRAILQNQGN

SEQ ID NO: 517 - protein, 199 aa, synthetic construct
MEASPASGPRHLMDPHIFYSNFNNGIGRHKTYLCYEVERLDNGTSVKMDQHRGFLHNQAKNLLCGFYGRHAELLFLDLVPSLQLDPAQIYRVTWFISWSPCFSWGCAAEVRAFLQENTHVRLRIFAARIADHWPLYKEALQMLRDAGAQVSIMTYDEFKHCWDTFVDHQGAPFQPWDGLDEHSQALSQRLRAILQNQGN

SEQ ID NO: 518 - protein, 199 aa, synthetic construct
MEASPASGPRHLMDPHIFYSNFNNGIGRHKTYLCYEVERLDNGTWVKMDQHRGFLHNQAKNLLCGFYGRHAELLFLDLVPSLQLDPAQIYRVTWFISWSPCFSWGCAAEVRAFLQENTHVRLRIFAARIADHWPLYKEALQMLRDAGAQVSIMTYDEFKHCWDTFVDHQGAPFQPWDGLDEHSQALSQRLRAILQNQGN

SEQ ID NO: 519 - protein, 199 aa, synthetic construct
MEASPASGPRHLMDPHIFYSNFNNRIGRHKTYLCYEVERLDNGTSVKMDQHRGFLHNQAKNLLCGFYGRHAELLFLDLVPSLQLDPAQIYRVTWFISWSPCFSWGCAAEVRAFLQENTHVRLRIFAARIADHWPLYKEALQMLRDAGAQVSIMTYDEFKHCWDTFVDHQGAPFQPWDGLDEHSQALSQRLRAILQNQGN

SEQ ID NO: 520 - protein, 199 aa, synthetic construct
MEASPASGPRHLMDPHIFYSNFNNRIGRHKTYLCYEVERLDNGTWVKMDQHRGFLHNQAKNLLCGFYGRHAELLFLDLVPSLQLDPAQIYRVTWFISWSPCFSWGCAAEVRAFLQENTHVRLRIFAARIADHWPLYKEALQMLRDAGAQVSIMTYDEFKHCWDTFVDHQGAPFQPWDGLDEHSQALSQRLRAILQNQGN

SEQ ID NO: 521 - protein, 199 aa, synthetic construct
MEASPASGPRHLMDPHIFYSNFNNKIGRHKTYLCYEVERLDNGTSVKMDQHRGFLHNQAKNLLCGFYGRHAELLFLDLVPSLQLDPAQIYRVTWFISWSPCFSWGCAAEVRAFLQENTHVRLRIFAARIADHWPLYKEALQMLRDAGAQVSIMTYDEFKHCWDTFVDHQGAPFQPWDGLDEHSQALSQRLRAILQNQGN

SEQ ID NO: 522 - protein, 199 aa, synthetic construct
MEASPASGPRHLMDPHIFYSNFNNKIGRHKTYLCYEVERLDNGTWVKMDQHRGFLHNQAKNLLCGFYGRHAELLFLDLVPSLQLDPAQIYRVTWFISWSPCFSWGCAAEVRAFLQENTHVRLRIFAARIADHWPLYKEALQMLRDAGAQVSIMTYDEFKHCWDTFVDHQGAPFQPWDGLDEHSQALSQRLRAILQNQGN

SEQ ID NO: 523 - protein, 199 aa, synthetic construct
MEASPASGPRHLMDPHIFYSNFNNGIGRHKTYLCYEVERLDNGTSVKMDQHRGFLHNQAKNLLCGFYGRHAELLFLDLVPSLQLDPAQIYRVTWFISWSPCFSWGCAAEVRAFLQENTHVRLRIFAARIADHWPLYKEALQMLRDAGAQVSIMTYDEFKHCWDTFVDHQGAPFQPWDGLDEHSQALSARLRAILQNQGN

SEQ ID NO: 524 - protein, 199 aa, synthetic construct
MEASPASGPRHLMDPHIFYSNFNNGIGRHKTYLCYEVERLDNGTWVKMDQHRGFLHNQAKNLLCGFYGRHAELLFLDLVPSLQLDPAQIYRVTWFISWSPCFSWGCAAEVRAFLQENTHVRLRIFAARIADHWPLYKEALQMLRDAGAQVSIMTYDEFKHCWDTFVDHQGAPFQPWDGLDEHSQALSARLRAILQNQGN

SEQ ID NO: 525 - protein, 199 aa, synthetic construct
MEASPASGPRHLMDPHIFYSNFNNRIGRHKTYLCYEVERLDNGTSVKMDQHRGFLHNQAKNLLCGFYGRHAELLFLDLVPSLQLDPAQIYRVTWFISWSPCFSWGCAAEVRAFLQENTHVRLRIFAARIADHWPLYKEALQMLRDAGAQVSIMTYDEFKHCWDTFVDHQGAPFQPWDGLDEHSQALSARLRAILQNQGN

SEQ ID NO: 526 - protein, 199 aa, synthetic construct
MEASPASGPRHLMDPHIFYSNFNNRIGRHKTYLCYEVERLDNGTWVKMDQHRGFLHNQAKNLLCGFYGRHAELLFLDLVPSLQLDPAQIYRVTWFISWSPCFSWGCAAEVRAFLQENTHVRLRIFAARIADHWPLYKEALQMLRDAGAQVSIMTYDEFKHCWDTFVDHQGAPFQPWDGLDEHSQALSARLRAILQNQGN

SEQ ID NO: 527 - protein, 199 aa, synthetic construct
MEASPASGPRHLMDPHIFYSNFNNKIGRHKTYLCYEVERLDNGTSVKMDQHRGFLHNQAKNLLCGFYGRHAELLFLDLVPSLQLDPAQIYRVTWFISWSPCFSWGCAAEVRAFLQENTHVRLRIFAARIADHWPLYKEALQMLRDAGAQVSIMTYDEFKHCWDTFVDHQGAPFQPWDGLDEHSQALSARLRAILQNQGN

SEQ ID NO: 528 - protein, 199 aa, synthetic construct
MEASPASGPRHLMDPHIFYSNFNNKIGRHKTYLCYEVERLDNGTWVKMDQHRGFLHNQAKNLLCGFYGRHAELLFLDLVPSLQLDPAQIYRVTWFISWSPCFSWGCAAEVRAFLQENTHVRLRIFAARIADHWPLYKEALQMLRDAGAQVSIMTYDEFKHCWDTFVDHQGAPFQPWDGLDEHSQALSARLRAILQNQGN

SEQ ID NO: 529 - protein, 199 aa, synthetic construct
MEASPASGPRHLMDPHIFYSNFNNGIGRHKTYLCYEVERLDNGTSVKMDQHRGFLHNQAKNLLCGFYGRHAELLFLDLVPSLQLDPAQIYRVTWFISWSPCFSWGCAAEVRAFLQENTHVRLRIFAARIADHWPLYKEALQMLRDAGAQVSIMTYDEFKHCWDTFVDHQGAPFQPWDGLDEHSQALSRRLRAILQNQGN

SEQ ID NO: 530 - protein, 199 aa, synthetic construct
MEASPASGPRHLMDPHIFYSNFNNGIGRHKTYLCYEVERLDNGTWVKMDQHRGFLHNQAKNLLCGFYGRHAELLFLDLVPSLQLDPAQIYRVTWFISWSPCFSWGCAAEVRAFLQENTHVRLRIFAARIADHWPLYKEALQMLRDAGAQVSIMTYDEFKHCWDTFVDHQGAPFQPWDGLDEHSQALSRRLRAILQNQGN

SEQ ID NO: 531 - protein, 199 aa, synthetic construct
MEASPASGPRHLMDPHIFYSNFNNRIGRHKTYLCYEVERLDNGTSVKMDQHRGFLHNQAKNLLCGFYGRHAELLFLDLVPSLQLDPAQIYRVTWFISWSPCFSWGCAAEVRAFLQENTHVRLRIFAARIADHWPLYKEALQMLRDAGAQVSIMTYDEFKHCWDTFVDHQGAPFQPWDGLDEHSQALSRRLRAILQNQGN

SEQ ID NO: 532 - protein, 199 aa, synthetic construct
MEASPASGPRHLMDPHIFYSNFNNRIGRHKTYLCYEVERLDNGTWVKMDQHRGFLHNQAKNLLCGFYGRHAELLFLDLVPSLQLDPAQIYRVTWFISWSPCFSWGCAAEVRAFLQENTHVRLRIFAARIADHWPLYKEALQMLRDAGAQVSIMTYDEFKHCWDTFVDHQGAPFQPWDGLDEHSQALSRRLRAILQNQGN

SEQ ID NO: 533 - protein, 199 aa, synthetic construct
MEASPASGPRHLMDPHIFYSNFNNKIGRHKTYLCYEVERLDNGTSVKMDQHRGFLHNQAKNLLCGFYGRHAELLFLDLVPSLQLDPAQIYRVTWFISWSPCFSWGCAAEVRAFLQENTHVRLRIFAARIADHWPLYKEALQMLRDAGAQVSIMTYDEFKHCWDTFVDHQGAPFQPWDGLDEHSQALSRRLRAILQNQGN

SEQ ID NO: 534 - protein, 199 aa, synthetic construct; identical to SEQ ID NO: 74

SEQ ID NO: 535 - protein, 199 aa, synthetic construct
MEASPASGPRHLMDPHIFYSNFNNGIGRHKTYLCYEVERLDNGTSVKMDQHRGFLHNQAKNLLCGFYGRHAELLFLDLVPSLQLDPAQIYRVTWFISWSPCFSWGCACEVRAFLQENTHVRLRIFAARIADHWPLYKEALQMLRDAGAQVSIMTYDEFKHCWDTFVDHQGAPFQPWDGLDEHSQALSGRLRAILQNQGN

SEQ ID NO: 536 - protein, 199 aa, synthetic construct
MEASPASGPRHLMDPHIFYSNFNNGIGRHKTYLCYEVERLDNGTWVKMDQHRGFLHNQAKNLLCGFYGRHAELLFLDLVPSLQLDPAQIYRVTWFISWSPCFSWGCACEVRAFLQENTHVRLRIFAARIADHWPLYKEALQMLRDAGAQVSIMTYDEFKHCWDTFVDHQGAPFQPWDGLDEHSQALSGRLRAILQNQGN

SEQ ID NO: 537 - protein, 199 aa, synthetic construct
MEASPASGPRHLMDPHIFYSNFNNRIGRHKTYLCYEVERLDNGTSVKMDQHRGFLHNQAKNLLCGFYGRHAELLFLDLVPSLQLDPAQIYRVTWFISWSPCFSWGCACEVRAFLQENTHVRLRIFAARIADHWPLYKEALQMLRDAGAQVSIMTYDEFKHCWDTFVDHQGAPFQPWDGLDEHSQALSGRLRAILQNQGN

SEQ ID NO: 538 - protein, 199 aa, synthetic construct
MEASPASGPRHLMDPHIFYSNFNNRIGRHKTYLCYEVERLDNGTWVKMDQHRGFLHNQAKNLLCGFYGRHAELLFLDLVPSLQLDPAQIYRVTWFISWSPCFSWGCACEVRAFLQENTHVRLRIFAARIADHWPLYKEALQMLRDAGAQVSIMTYDEFKHCWDTFVDHQGAPFQPWDGLDEHSQALSGRLRAILQNQGN

SEQ ID NO: 539 - protein, 199 aa, synthetic construct
MEASPASGPRHLMDPHIFYSNFNNKIGRHKTYLCYEVERLDNGTSVKMDQHRGFLHNQAKNLLCGFYGRHAELLFLDLVPSLQLDPAQIYRVTWFISWSPCFSWGCACEVRAFLQENTHVRLRIFAARIADHWPLYKEALQMLRDAGAQVSIMTYDEFKHCWDTFVDHQGAPFQPWDGLDEHSQALSGRLRAILQNQGN

SEQ ID NO: 540 - protein, 199 aa, synthetic construct
MEASPASGPRHLMDPHIFYSNFNNKIGRHKTYLCYEVERLDNGTWVKMDQHRGFLHNQAKNLLCGFYGRHAELLFLDLVPSLQLDPAQIYRVTWFISWSPCFSWGCACEVRAFLQENTHVRLRIFAARIADHWPLYKEALQMLRDAGAQVSIMTYDEFKHCWDTFVDHQGAPFQPWDGLDEHSQALSGRLRAILQNQGN

SEQ ID NO: 541 - protein, 199 aa, synthetic construct
MEASPASGPRHLMDPHIFYSNFNNGIGRHKTYLCYEVERLDNGTSVKMDQHRGFLHNQAKNLLCGFYGRHAELLFLDLVPSLQLDPAQIYRVTWFISWSPCFSWGCACEVRAFLQENTHVRLRIFAARIADHWPLYKEALQMLRDAGAQVSIMTYDEFKHCWDTFVDHQGAPFQPWDGLDEHSQALSQRLRAILQNQGN

SEQ ID NO: 542 - protein, 199 aa, synthetic construct
MEASPASGPRHLMDPHIFYSNFNNGIGRHKTYLCYEVERLDNGTWVKMDQHRGFLHNQAKNLLCGFYGRHAELLFLDLVPSLQLDPAQIYRVTWFISWSPCFSWGCACEVRAFLQENTHVRLRIFAARIADHWPLYKEALQMLRDAGAQVSIMTYDEFKHCWDTFVDHQGAPFQPWDGLDEHSQALSQRLRAILQNQGN

SEQ ID NO: 543 - protein, 199 aa, synthetic construct
MEASPASGPRHLMDPHIFYSNFNNRIGRHKTYLCYEVERLDNGTSVKMDQHRGFLHNQAKNLLCGFYGRHAELLFLDLVPSLQLDPAQIYRVTWFISWSPCFSWGCACEVRAFLQENTHVRLRIFAARIADHWPLYKEALQMLRDAGAQVSIMTYDEFKHCWDTFVDHQGAPFQPWDGLDEHSQALSQRLRAILQNQGN

SEQ ID NO: 544 - protein, 199 aa, synthetic construct
MEASPASGPRHLMDPHIFYSNFNNRIGRHKTYLCYEVERLDNGTWVKMDQHRGFLHNQAKNLLCGFYGRHAELLFLDLVPSLQLDPAQIYRVTWFISWSPCFSWGCACEVRAFLQENTHVRLRIFAARIADHWPLYKEALQMLRDAGAQVSIMTYDEFKHCWDTFVDHQGAPFQPWDGLDEHSQALSQRLRAILQNQGN

SEQ ID NO: 545 - protein, 199 aa, synthetic construct
MEASPASGPRHLMDPHIFYSNFNNKIGRHKTYLCYEVERLDNGTSVKMDQHRGFLHNQAKNLLCGFYGRHAELLFLDLVPSLQLDPAQIYRVTWFISWSPCFSWGCACEVRAFLQENTHVRLRIFAARIADHWPLYKEALQMLRDAGAQVSIMTYDEFKHCWDTFVDHQGAPFQPWDGLDEHSQALSQRLRAILQNQGN

SEQ ID NO: 546 - protein, 199 aa, synthetic construct
MEASPASGPRHLMDPHIFYSNFNNKIGRHKTYLCYEVERLDNGTWVKMDQHRGFLHNQAKNLLCGFYGRHAELLFLDLVPSLQLDPAQIYRVTWFISWSPCFSWGCACEVRAFLQENTHVRLRIFAARIADHWPLYKEALQMLRDAGAQVSIMTYDEFKHCWDTFVDHQGAPFQPWDGLDEHSQALSQRLRAILQNQGN

SEQ ID NO: 547 - protein, 199 aa, synthetic construct
MEASPASGPRHLMDPHIFYSNFNNGIGRHKTYLCYEVERLDNGTSVKMDQHRGFLHNQAKNLLCGFYGRHAELLFLDLVPSLQLDPAQIYRVTWFISWSPCFSWGCACEVRAFLQENTHVRLRIFAARIADHWPLYKEALQMLRDAGAQVSIMTYDEFKHCWDTFVDHQGAPFQPWDGLDEHSQALSARLRAILQNQGN

SEQ ID NO: 548 - protein, 199 aa, synthetic construct
MEASPASGPRHLMDPHIFYSNFNNGIGRHKTYLCYEVERLDNGTWVKMDQHRGFLHNQAKNLLCGFYGRHAELLFLDLVPSLQLDPAQIYRVTWFISWSPCFSWGCACEVRAFLQENTHVRLRIFAARIADHWPLYKEALQMLRDAGAQVSIMTYDEFKHCWDTFVDHQGAPFQPWDGLDEHSQALSARLRAILQNQGN

SEQ ID NO: 549 - protein, 199 aa, synthetic construct
MEASPASGPRHLMDPHIFYSNFNNRIGRHKTYLCYEVERLDNGTSVKMDQHRGFLHNQAKNLLCGFYGRHAELLFLDLVPSLQLDPAQIYRVTWFISWSPCFSWGCACEVRAFLQENTHVRLRIFAARIADHWPLYKEALQMLRDAGAQVSIMTYDEFKHCWDTFVDHQGAPFQPWDGLDEHSQALSARLRAILQNQGN

SEQ ID NO: 550 - protein, 199 aa, synthetic construct
MEASPASGPRHLMDPHIFYSNFNNRIGRHKTYLCYEVERLDNGTWVKMDQHRGFLHNQAKNLLCGFYGRHAELLFLDLVPSLQLDPAQIYRVTWFISWSPCFSWGCACEVRAFLQENTHVRLRIFAARIADHWPLYKEALQMLRDAGAQVSIMTYDEFKHCWDTFVDHQGAPFQPWDGLDEHSQALSARLRAILQNQGN

SEQ ID NO: 551 - protein, 199 aa, synthetic construct
MEASPASGPRHLMDPHIFYSNFNNKIGRHKTYLCYEVERLDNGTSVKMDQHRGFLHNQAKNLLCGFYGRHAELLFLDLVPSLQLDPAQIYRVTWFISWSPCFSWGCACEVRAFLQENTHVRLRIFAARIADHWPLYKEALQMLRDAGAQVSIMTYDEFKHCWDTFVDHQGAPFQPWDGLDEHSQALSARLRAILQNQGN

SEQ ID NO: 552 - protein, 199 aa, synthetic construct
MEASPASGPRHLMDPHIFYSNFNNKIGRHKTYLCYEVERLDNGTWVKMDQHRGFLHNQAKNLLCGFYGRHAELLFLDLVPSLQLDPAQIYRVTWFISWSPCFSWGCACEVRAFLQENTHVRLRIFAARIADHWPLYKEALQMLRDAGAQVSIMTYDEFKHCWDTFVDHQGAPFQPWDGLDEHSQALSARLRAILQNQGN

SEQ ID NO: 553 - protein, 199 aa, synthetic construct
MEASPASGPRHLMDPHIFYSNFNNGIGRHKTYLCYEVERLDNGTSVKMDQHRGFLHNQAKNLLCGFYGRHAELLFLDLVPSLQLDPAQIYRVTWFISWSPCFSWGCACEVRAFLQENTHVRLRIFAARIADHWPLYKEALQMLRDAGAQVSIMTYDEFKHCWDTFVDHQGAPFQPWDGLDEHSQALSRRLRAILQNQGN

SEQ ID NO: 554 - protein, 199 aa, synthetic construct
MEASPASGPRHLMDPHIFYSNFNNGIGRHKTYLCYEVERLDNGTWVKMDQHRGFLHNQAKNLLCGFYGRHAELLFLDLVPSLQLDPAQIYRVTWFISWSPCFSWGCACEVRAFLQENTHVRLRIFAARIADHWPLYKEALQMLRDAGAQVSIMTYDEFKHCWDTFVDHQGAPFQPWDGLDEHSQALSRRLRAILQNQGN

SEQ ID NO: 555 - protein, 199 aa, synthetic construct
MEASPASGPRHLMDPHIFYSNFNNRIGRHKTYLCYEVERLDNGTSVKMDQHRGFLHNQAKNLLCGFYGRHAELLFLDLVPSLQLDPAQIYRVTWFISWSPCFSWGCACEVRAFLQENTHVRLRIFAARIADHWPLYKEALQMLRDAGAQVSIMTYDEFKHCWDTFVDHQGAPFQPWDGLDEHSQALSRRLRAILQNQGN

SEQ ID NO: 556 - protein, 199 aa, synthetic construct
MEASPASGPRHLMDPHIFYSNFNNRIGRHKTYLCYEVERLDNGTWVKMDQHRGFLHNQAKNLLCGFYGRHAELLFLDLVPSLQLDPAQIYRVTWFISWSPCFSWGCACEVRAFLQENTHVRLRIFAARIADHWPLYKEALQMLRDAGAQVSIMTYDEFKHCWDTFVDHQGAPFQPWDGLDEHSQALSRRLRAILQNQGN

SEQ ID NO: 557 - protein, 199 aa, synthetic construct
MEASPASGPRHLMDPHIFYSNFNNKIGRHKTYLCYEVERLDNGTSVKMDQHRGFLHNQAKNLLCGFYGRHAELLFLDLVPSLQLDPAQIYRVTWFISWSPCFSWGCACEVRAFLQENTHVRLRIFAARIADHWPLYKEALQMLRDAGAQVSIMTYDEFKHCWDTFVDHQGAPFQPWDGLDEHSQALSRRLRAILQNQGN

SEQ ID NO: 558 - protein, 199 aa, synthetic construct
MEASPASGPRHLMDPHIFYSNFNNKIGRHKTYLCYEVERLDNGTWVKMDQHRGFLHNQAKNLLCGFYGRHAELLFLDLVPSLQLDPAQIYRVTWFISWSPCFSWGCACEVRAFLQENTHVRLRIFAARIADHWPLYKEALQMLRDAGAQVSIMTYDEFKHCWDTFVDHQGAPFQPWDGLDEHSQALSRRLRAILQNQGN

SEQ ID NO: 559 - protein, 199 aa, synthetic construct
MEASPASGPRHLMDPHIFYSNFNNGIGRHKTYLVYEVERLDNGTSVKMDQHRGFLHNQAKNLLCGFYGRHAELLFLDLVPSLQLDPAQIYRVTWFISWSPCFSWGCAGEVRAFLQENTHVRLRIFAARIADHWPLYKEALQMLRDAGAQVSIMTYDEFKHVWDTFVDHQGAPFQPWDGLDEHSQALSGRLRAILQNQGN

SEQ ID NO: 560 - protein, 199 aa, synthetic construct
MEASPASGPRHLMDPHIFYSNFNNGIGRHKTYLVYEVERLDNGTSVKMDQHRGFLHNQAKNLLCGFYGRHAELLFLDLVPSLQLDPAQIYRVTWFISWSPCFSWGCAGEVRAFLQENTHVRLRIFAARIADHWPLYKEALQMLRDAGAQVSIMTYDEFKHLWDTFVDHQGAPFQPWDGLDEHSQALSGRLRAILQNQGN

SEQ ID NO: 561 - protein, 199 aa, synthetic construct
MEASPASGPRHLMDPHIFYSNFNNGIGRHKTYLLYEVERLDNGTSVKMDQHRGFLHNQAKNLLCGFYGRHAELLFLDLVPSLQLDPAQIYRVTWFISWSPCFSWGCAGEVRAFLQENTHVRLRIFAARIADHWPLYKEALQMLRDAGAQVSIMTYDEFKHVWDTFVDHQGAPFQPWDGLDEHSQALSGRLRAILQNQGN

SEQ ID NO: 562 - protein, 199 aa, synthetic construct
MEASPASGPRHLMDPHIFYSNFNNGIGRHKTYLLYEVERLDNGTSVKMDQHRGFLHNQAKNLLCGFYGRHAELLFLDLVPSLQLDPAQIYRVTWFISWSPCFSWGCAGEVRAFLQENTHVRLRIFAARIADHWPLYKEALQMLRDAGAQVSIMTYDEFKHLWDTFVDHQGAPFQPWDGLDEHSQALSGRLRAILQNQGN

SEQ ID NO: 563 - protein, 199 aa, synthetic construct
MEASPASGPRHLMDPHIFYSNFNNGIGRHKTYLCYEVERLDNGTWVKMDQHRGFLHNQAKNLLCGFYGRHAELLFLDLVPSLQLDPAQIYRVTWFISWSPCFSWGCAGEVRAFLQENTHVRLRIFCARIADHWPLYKEALQMLRDAGAQVSIMTYDEFKHCWDTFVDHQGAPFQPWDGLDEHSQALSGRLRAILQNQGN

SEQ ID NO: 564 - protein, 199 aa, synthetic construct
MEASPASGPRHLMDPHIFYSNFNNGIGVHKTYLCYEVERLDNGTWVKMDQHRGFLHNQAKNLLCGFYGRHAELLFLDLVPSLQLDPAQIYRVTWFISWSPCFSWGCAGEVRAFLQENTHVRLRIFAARIADHWPLYKEALQMLRDAGAQVSIMTYDEFKHCWDTFVDHQGAPFQPWDGLDEHSQALSGRLRAILQNQGN

SEQ ID NO: 565 - protein, 199 aa, synthetic construct
MEASPASGPRHWMDPHIFYSNFNNGIGRHKTYLCYEVERLDNGTWVKMDQHRGFLHNQAKNLLCGFYGRHAELLFLDLVPSLQLDPAQIYRVTWFISWSPCFSWGCAGEVRAFLQENTHVRLRIFAARIADHWPLYKEALQMLRDAGAQVSIMTYDEFKHCWDTFVDHQGAPFQPWDGLDEHSQALSGRLRAILQNQGN

SEQ ID NO: 566 - protein, 199 aa, synthetic construct
MEASPASGPRHWMDPHIFYSNFNNGIGVHKTYLCYEVERLDNGTWVKMDQHRGFLHNQAKNLLCGFYGRHAELLFLDLVPSLQLDPAQIYRVTWFISWSPCFSWGCAGEVRAFLQENTHVRLRIFCARIADHWPLYKEALQMLRDAGAQVSIMTYDEFKHCWDTFVDHQGAPFQPWDGLDEHSQALSGRLRAILQNQGN

SEQ ID NO: 567 - protein, 191 aa, synthetic construct
MEASPASGPRHLMDPHIFYSNFNNGIGRHKTYLCYEVERLDNGTSVKMDQHRGFLHNQPRRHAELLFLDLVPSLQLDPAQIYRVTWFISWSPCFSWGCAGEVRAFLQENTHVRLRIFAARIADHWPLYKEALQMLRDAGAQVSIMTYDEFKHCWDTFVDHQGAPFQPWDGLDEHSQALSGRLRAILQNQGN

SEQ ID NO: 568 - protein, 191 aa, synthetic construct
MEASPASGPRHLMDPHIFYSNFNNGIGRHKTYLCYEVERLDNGTSVKMDQHRGFLHNESGRHAELLFLDLVPSLQLDPAQIYRVTWFISWSPCFSWGCAGEVRAFLQENTHVRLRIFAARIADHWPLYKEALQMLRDAGAQVSIMTYDEFKHCWDTFVDHQGAPFQPWDGLDEHSQALSGRLRAILQNQGN

SEQ ID NO: 569 - protein, 199 aa, synthetic construct
MEASPASGPRHLMDPHTFYSNFNNKIGRHKTYLCYEVERLDNGTWVKMDQHRGFLHNQAKNLLCGFYGRHAELLFLDLVPSLQLDPAQIYRVTWFISWSPCFSWGCAAEVRAFLQENTHVRLRIFAARIADHWPLYKEALQMLRDAGAQVSIMTYDEFKHCWDTFVDHQGAPFQPWDGLDEHSQALSRRLRAILQNQGN

SEQ ID NO: 570 - protein, 199 aa, synthetic construct
MEASPASGPRHLMDPHTFYSNFNNRIGRHKTYLCYEVERLDNGTWVKMDQHRGFLHNQAKNLLCGFYGRHAELLFLDLVPSLQLDPAQIYRVTWFISWSPCFSWGCAAEVRAFLQENTHVRLRIFAARIADHWPLYKEALQMLRDAGAQVSIMTYDEFKHCWDTFVDHQGAPFQPWDGLDEHSQALSRRLRAILQNQGN

SEQ ID NO: 571 - protein, 199 aa, synthetic construct
MEASPASGPRHLMDPHTFYSNFNNKIGRHKTYLCYEVERLDNGTWVKMDQHRGFLHNQAKNLLCGFYGRHAELLFLDLVPSLQLDPAQIYRVTWFISWSPCFSWGCAAEVRAFLQENTHVRLRIFAARIADHWPLYKEALQMLRDAGAQVSIMTYDEFKHCWDTFVDHQGAPFQPWDGLDEHSQILSRRLRAILQNQGN

SEQ ID NO: 572 - protein, 199 aa, synthetic construct
MEASPASGPRHLMDPHTFYSNFNNRIGRHKTYLCYEVERLDNGTWVKMDQHRGFLHNQAKNLLCGFYGRHAELLFLDLVPSLQLDPAQIYRVTWFISWSPCFSWGCAAEVRAFLQENTHVRLRIFAARIADHWPLYKEALQMLRDAGAQVSIMTYDEFKHCWDTFVDHQGAPFQPWDGLDEHSQILSRRLRAILQNQGN

SEQ ID NO: 573 - protein, 199 aa, synthetic construct
MEASPASGPRHLMYPHTFYSNFNNKIGRHKTYLCYEVERLDNGTWVKMDQHRGFLHNQAKNLLCGFYGRHAELLFLDHVPSLQLDPAQHYRVTWFISWSPCFSWGCAAEVRAFLQENTHVRLRIFAARIADHWPLYKEALQMLRDAGAQVSIMTYDEFKHCWDTFVDHQGAPFQPWDGLDEHSQILSRRLRAILQNQGN

SEQ ID NO: 574 - protein, 199 aa, synthetic construct
MEASPASGPRHLMDPHTFYSNFNNKIGRHKTYLCYEVERLDNGTWVKMDQHRGFLHNQAKNPLCGFYGRHAELLFLDLVPSLQLDPAQRYRVTWFISWSPCFSWGCAAEVRAFLQENTHVRLRIFAARIADHWPLYKEALQMLRDAGAQVSIMTYDEFKHCWDTFVDHQGAPFQPWDGLDEHSQILSRRLRAILQNQGN

SEQ ID NO: 575 - protein, 191 aa, synthetic construct
MEASPASGPRHLMDPHTFYSNFNNKIGRHKTYLCYEVERLDNGTWVKMDQHRGFLHNQPRRHAELLFLDLVPSLQLDPAQIYRVTWFISWSPCFSWGCAAEVRAFLQENTHVRLRIFAARIADHWPLYKEALQMLRDAGAQVSIMTYDEFKHCWDTFVDHQGAPFQPWDGLDEHSQILSRRLRAILQNQGN

SEQ ID NO: 576 - protein, 191 aa, synthetic construct
MEASPASGPRHLMDPHTFYSNFNNRIGRHKTYLCYEVERLDNGTWVKMDQHRGFLHNQPRRHAELLFLDLVPSLQLDPAQIYRVTWFISWSPCFSWGCAAEVRAFLQENTHVRLRIFAARIADHWPLYKEALQMLRDAGAQVSIMTYDEFKHCWDTFVDHQGAPFQPWDGLDEHSQILSRRLRAILQNQGN

SEQ ID NO: 577 - protein, 199 aa, synthetic construct
MEASPASGPRHLMDPHTFYSNFNNKIGRHKTYLCYEVERLDNGTWVKMDQHRGFLHNQAKNLLCGFYGRHAELLFLDLVPSLQLDPAQIYRVTWFISWSPCFSWGCACEVRAFLQENTHVRLRIFAARIADHWPLYKEALQMLRDAGAQVSIMTYDEFKHCWDTFVDHQGAPFQPWDGLDEHSQALSRRLRAILQNQGN

SEQ ID NO: 578 - protein, 199 aa, synthetic construct
MEASPASGPRHWMDPHTFYSNFNNKIGVHKTYLCYEVERLDNGTWVKMDQHRGFLHNQAKNLLCGFYGRHAELLFLDLVPSLQLDPAQIYRVTWFISWSPCFSWGCAAEVRAFLQENTHVRLRIFCARIADHWPLYKEALQMLRDAGAQVSIMTYDEFKHCWDTFVDHQGAPFQPWDGLDEHSQALSRRLRAILQNQGN

SEQ ID NO: 579 - protein, 191 aa, synthetic construct
MEASPASGPRHLMDPHTFYSNFNNKIGRHKTYLCYEVERLDNGTWVKMDQHRGFLHNQPRRHAELLFLDLVPSLQLDPAQIYRVTWFISWSPCFSWGCAAEVRAFLQENTHVRLRIFCARIADHWPLYKEALQMLRDAGAQVSIMTYDEFKHCWDTFVDHQGAPFQPWDGLDEHSQALSRRLRAILQNQGN

SEQ ID NO: 580-581 - skipped (2 entries)

SEQ ID NO: 582 - protein, 191 aa, synthetic construct
MEASPASGPRHLMDPDTFYSNFNNKIGRHKTYLCYEVERLDNGTWVKMDQHRGFLHNQPRRHAELLFLDLVPSLQLDPAQIYRVTWFISWSPCFSWGCACEVRAFLQENTHVRLRIFAARIADHWPLYKEALQMLRDAGAQVSIMTYDEFKHCWDTFVDHQGAPFQPWDGLDEHSQALSRRLRAILQNQGN

SEQ ID NO: 583 - protein, 191 aa, synthetic construct
MEASPASGPRHLMDPHTFYFNFNNKIGRHKTYLCYEVERLDNGTWVKMDQHRGFLHNQPRRHAELLFLDLVPSLQLDPAQIYRVTWFISWSPCFSWGCACEVRAFLQENTHVRLRIFAARIADHWPLYKEALQMLRDAGAQVSIMTYDEFKHCWDTFVDHQGAPFQPWDGLDEHSQALSRRLRAILQNQGN

SEQ ID NO: 584 - protein, 191 aa, synthetic construct
MEASPASGPRHLMDPHTFYSNFNNKLGRHKTYLCYEVERLDNGTWVKMDQHRGFLHNQPRRHAELLFLDLVPSLQLDPAQIYRVTWFISWSPCFSWGCACEVRAFLQENTHVRLRIFAARIADHWPLYKEALQMLRDAGAQVSIMTYDEFKHCWDTFVDHQGAPFQPWDGLDEHSQALSRRLRAILQNQGN

SEQ ID NO: 585 - protein, 191 aa, synthetic construct
MEASPASGPRHLMDPHTFYSNFNNKIGRHKTYLCYEVERLDNGTWVKMDQHRGFLHNQPRRHAELLFLDLVPSLQLDPAQIYRVTWFISWSPCFSWGCACEVRAFLQENTHVRLRIFAARIADHWPLYKEALQMLRDAGAQVSIMTYDEFKHCWDTFVDHRGAPFQPWDGLDEHSQALSRRLRAILQNQGN

SEQ ID NO: 586 - protein, 191 aa, synthetic construct
MEASPASGPRHLMDPHTFYSNFNNKIGRHKTYLCYEVERLDNGTWVKMDQHRGFLHNQPRRHAELLFLDLVPSLQLDPAQIYRVTWFISWSPCFSWGCACEVRAFLQENTHVRLRIFAARIADHWPLYKEALQMLRDAGAQVSIMTYDEFKHCWDTFVDHQGAPFQPWEGLDEHSQALSRRLRAILQNQGN

SEQ ID NO: 587 - protein, 191 aa, synthetic construct
MEASPASGPRHLMDPHTFYSNFNNKIGRHKTYLCYEVERLDNGTWVKMDQHRGFLHNQPRRHAELLFLDLVPSLQLDPAQIYRVTWFISWSPCFSWGCACEVRAFLQENTHVRLRIFAARIADHWPLYKEALQMLRDAGAQVSIMTYDEFKHCWDTFVDHQGAPFQPWDGLHEHSQALSRRLRAILQNQGN

SEQ ID NO: 588 - protein, 191 aa, synthetic construct
MEASPASGPRHLMDPHTFYSNFNNKIGRHKTYLCYEVERLDNGTWVKMDQHRGFLHNQPRRHAELLFLDLVPSLQLDPAQIYRVTWFISWSPCFSWGCACEVRAFLQENTHVRLRIFAARIADHWPLYKEALQMLRDAGAQVSIMTYDEFKHCWDTFVDHQGAPFQPWDGLDENSQALSRRLRAILQNQGN

SEQ ID NO: 589 - protein, 191 aa, synthetic construct
MEASPASGPRHLMDPHTFYSNFNNKIGRHKTYLCYEVERLDNGTWVKMDQHRGFLHNQPRRHAELLFLDLVPSLQLDPAQIYRVTWFISWSPCFSWGCACEVRAFLQENTHVRLRIFAARIADHWPLYKEALQMLRDAGAQVSIMTYDEFKHCWDTFVDHQGAPFQPWDGLDEHSVALSRRLRAILQNQGN

SEQ ID NO: 590 - protein, 191 aa, synthetic construct
MEASPASGPRHLMDPHTFYSNFNNKIGRHKTYLCYEVERLDNGTWVKMDQHRGFLHNQPRRHAELLFLDLVPSLQLDPAQIYRVTWFISWSPCFSWGCACEVRAFLQENTHVRLRIFAARIADHWPLYKEALQMLRDAGAQVSIMTYDEFKHCWDTFVDHQGAPFQPWDGLDEHSQRLSRRLRAILQNQGN

SEQ ID NO: 591 - protein, 191 aa, synthetic construct
MEASPASGPRHLMDPHTFYSNFNNKIGRHKTYLCYEVERLDNGTWVKMDQHRGFLHNQPRRHAELLFLDLVPSLQLDPAQIYRVTWFISWSPCFSWGCACEVRAFLQENTHVRLRIFAARIADHWPLYKEALQMLRDAGAQVSIMTYDEFKHCWDTFVDHQGAPFQPWDGLDEHSQALSRKLRAILQNQGN

SEQ ID NO: 592 - protein, 191 aa, synthetic construct
MEASPASGPRHLMDPHTFYSNFNNKIGRHKTYLCYEVERLDNGTWVKMDQHRGFLHNQPRRHAELLFLDLVPSLQLDPAQIYRVTWFISWSPCFSWGCACEVRAFLQENTHVRLRIFAARIADHWPLYKEALQMLRDAGAQVSIMTYDEFKHCWDTFVDHQGAPFQPWDGLDEHSQALSRRLRRILQNQGN

SEQ ID NO: 593 - protein, 191 aa, synthetic construct
MEASPASGPRHLMDPHTFYWNFNNKIGRHKTYLCYEVERLDNGTWVKMDQHRGFLHNQPRRHAELLFLDLVPSLQLDPAQIYRVTWFISWSPCFSWGCACEVRAFLQENTHVRLRIFAARIADHWPLYKEALQMLRDAGAQVSIMTYDEFKHCWDTFVDHQGAPFQPWDGLDEHSQALSRRLRAILQNQGN

SEQ ID NO: 594 - protein, 191 aa, synthetic construct
MEASPASGPRHLMDPHTFYSNFNNKIFRHKTYLCYEVERLDNGTWVKMDQHRGFLHNQPRRHAELLFLDLVPSLQLDPAQIYRVTWFISWSPCFSWGCACEVRAFLQENTHVRLRIFAARIADHWPLYKEALQMLRDAGAQVSIMTYDEFKHCWDTFVDHQGAPFQPWDGLDEHSQALSRRLRAILQNQGN

SEQ ID NO: 595 - protein, 191 aa, synthetic construct
MEASPASGPRHLMDPHTFYSNFNNKICRHKTYLCYEVERLDNGTWVKMDQHRGFLHNQPRRHAELLFLDLVPSLQLDPAQIYRVTWFISWSPCFSWGCACEVRAFLQENTHVRLRIFAARIADHWPLYKEALQMLRDAGAQVSIMTYDEFKHCWDTFVDHQGAPFQPWDGLDEHSQALSRRLRAILQNQGN

SEQ ID NO: 596 - protein, 191 aa, synthetic construct
MEASPASGPRHLMDPHTFYSNFNNKIYRHKTYLCYEVERLDNGTWVKMDQHRGFLHNQPRRHAELLFLDLVPSLQLDPAQIYRVTWFISWSPCFSWGCACEVRAFLQENTHVRLRIFAARIADHWPLYKEALQMLRDAGAQVSIMTYDEFKHCWDTFVDHQGAPFQPWDGLDEHSQALSRRLRAILQNQGN

SEQ ID NO: 597 - protein, 191 aa, synthetic construct
MEASPASGPRHLMDPHTFYSNFNNKIGRHKIYLCYEVERLDNGTWVKMDQHRGFLHNQPRRHAELLFLDLVPSLQLDPAQIYRVTWFISWSPCFSWGCACEVRAFLQENTHVRLRIFAARIADHWPLYKEALQMLRDAGAQVSIMTYDEFKHCWDTFVDHQGAPFQPWDGLDEHSQALSRRLRAILQNQGN

SEQ ID NO: 598 - protein, 191 aa, synthetic construct
MEASPASGPRHLMDPHTFYSNFNNKIGRHKTYLRYEVERLDNGTWVKMDQHRGFLHNQPRRHAELLFLDLVPSLQLDPAQIYRVTWFISWSPCFSWGCACEVRAFLQENTHVRLRIFAARIADHWPLYKEALQMLRDAGAQVSIMTYDEFKHCWDTFVDHQGAPFQPWDGLDEHSQALSRRLRAILQNQGN

SEQ ID NO: 599 - protein, 191 aa, synthetic construct
MEASPASGPRHLMDPHTFYSNFNNKIGRHKTYLCYEVWRLDNGTWVKMDQHRGFLHNQPRRHAELLFLDLVPSLQLDPAQIYRVTWFISWSPCFSWGCACEVRAFLQENTHVRLRIFAARIADHWPLYKEALQMLRDAGAQVSIMTYDEFKHCWDTFVDHQGAPFQPWDGLDEHSQALSRRLRAILQNQGN

SEQ ID NO: 600 - protein, 191 aa, synthetic construct
MEASPASGPRHLMDPHTFYSNFNNKIGRHKTYLCYEVERLDNGTWVKMDQHRGFLHNQPRRHAELLFLDLVWSLQLDPAQIYRVTWFISWSPCFSWGCACEVRAFLQENTHVRLRIFAARIADHWPLYKEALQMLRDAGAQVSIMTYDEFKHCWDTFVDHQGAPFQPWDGLDEHSQALSRRLRAILQNQGN

SEQ ID NO: 601 - protein, 191 aa, synthetic construct
MEASPASGPRHLMDPHTFYSNFNNKIGRHKTYLCYEVERLDNGTWVKMDQHRGFLHNQPRRHAELLFLDLVPSLQLIPAQIYRVTWFISWSPCFSWGCACEVRAFLQENTHVRLRIFAARIADHWPLYKEALQMLRDAGAQVSIMTYDEFKHCWDTFVDHQGAPFQPWDGLDEHSQALSRRLRAILQNQGN

SEQ ID NO: 602 - protein, 191 aa, synthetic construct
MEASPASGPRHLMDPHTFYSNFNNKIGRHKTYLCYEVERLDNGTWVKMDQHRGFLHNQPRRHAELLFLDLVPSLQLDPAQIYRVTWFILWSPCFSWGCACEVRAFLQENTHVRLRIFAARIADHWPLYKEALQMLRDAGAQVSIMTYDEFKHCWDTFVDHQGAPFQPWDGLDEHSQALSRRLRAILQNQGN

SEQ ID NO: 603 - protein, 191 aa, synthetic construct
MEASPASGPRHLMDPHTFYSNFNNKIGRHKTYLCYEVERLDNGTWVKMDQHRGFLHNQPRRHAELLFLDLVPSLQLDPAQIYRVTWFISWSPWFSWGCACEVRAFLQENTHVRLRIFAARIADHWPLYKEALQMLRDAGAQVSIMTYDEFKHCWDTFVDHQGAPFQPWDGLDEHSQALSRRLRAILQNQGN

SEQ ID NO: 604 - protein, 191 aa, synthetic construct
MEASPASGPRHLMDPHTFYSNFNNKIGRHKTYLCYEVERLDNGTWVKMDQHRGFLHNQPRRHAELLFLDLVPSLQLDPAQIYRVTWFISWSPCFWWGCACEVRAFLQENTHVRLRIFAARIADHWPLYKEALQMLRDAGAQVSIMTYDEFKHCWDTFVDHQGAPFQPWDGLDEHSQALSRRLRAILQNQGN

SEQ ID NO: 605 - protein, 191 aa, synthetic construct
MEASPASGPRHLMDPHTFYSNFNNKIGRHKTYLCYEVERLDNGTWVKMDQHRGFLHNQPRRHAELLFLDLVPSLQLDPAQIYRVTWFISWSPCFFWGCACEVRAFLQENTHVRLRIFAARIADHWPLYKEALQMLRDAGAQVSIMTYDEFKHCWDTFVDHQGAPFQPWDGLDEHSQALSRRLRAILQNQGN

SEQ ID NO: 606 - protein, 191 aa, synthetic construct
MEASPASGPRHLMDPHTFYSNFNNKIGRHKTYLCYEVERLDNGTWVKMDQHRGFLHNQPRRHAELLFLDLVPSLQLDPAQIYRVTWFISWSPCFSWGCACWVRAFLQENTHVRLRIFAARIADHWPLYKEALQMLRDAGAQVSIMTYDEFKHCWDTFVDHQGAPFQPWDGLDEHSQALSRRLRAILQNQGN

SEQ ID NO: 607 - protein, 191 aa, synthetic construct
MEASPASGPRHLMDPHTFYSNFNNKIGRHKTYLCYEVERLDNGTWVKMDQHRGFLHNQPRRHAELLFLDLVPSLQLDPAQIYRVTWFISWSPCFSWGCACELRAFLQENTHVRLRIFAARIADHWPLYKEALQMLRDAGAQVSIMTYDEFKHCWDTFVDHQGAPFQPWDGLDEHSQALSRRLRAILQNQGN

SEQ ID NO: 608 - protein, 191 aa, synthetic construct
MEASPASGPRHLMDPHTFYSNFNNKIGRHKTYLCYEVERLDNGTWVKMDQHRGFLHNQPRRHAELLFLDLVPSLQLDPAQIYRVTWFISWSPCFSWGCACEVRAFLQENTHVRLRIFAAYIADHWPLYKEALQMLRDAGAQVSIMTYDEFKHCWDTFVDHQGAPFQPWDGLDEHSQALSRRLRAILQNQGN

SEQ ID NO: 609 - protein, 191 aa, synthetic construct
MEASPASGPRHLMDPHTFYSNFNNKIGRHKTYLCYEVERLDNGTWVKMDQHRGFLHNQPRRHAELLFLDLVPSLQLDPAQIYRVTWFISWSPCFSWGCACEVRAFLQENTHVRLRIFAARIADHWPLYKEWLQMLRDAGAQVSIMTYDEFKHCWDTFVDHQGAPFQPWDGLDEHSQALSRRLRAILQNQGN

SEQ ID NO: 610 - protein, 191 aa, synthetic construct
MEASPASGPRHLMDPHTFYSNFNNKIGRHKTYLCYEVERLDNGTWVKMDQHRGFLHNQPRRHAELLFLDLVPSLQLDPAQIYRVTWFISWSPCFSWGCACEVRAFLQENTHVRLRIFAARIADHWPLYKEALQMLRDAGLQVSIMTYDEFKHCWDTFVDHQGAPFQPWDGLDEHSQALSRRLRAILQNQGN

SEQ ID NO: 611 - protein, 191 aa, synthetic construct
MEASPASGPRHLMDPHTFYSNFNNKIGRHKTYLCYEVERLDNGTWVKMDQHRGFLHNQPRRHAELLFLDLVPSLQLDPAQIYRVTWFISWSPCFSWGCACEVRAFLQENTHVRLRIFAARIADHWPLYKEALQMLRDAGAQVSIMTYWEFKHCWDTFVDHQGAPFQPWDGLDEHSQALSRRLRAILQNQGN

SEQ ID NO: 612 - protein, 191 aa, synthetic construct
MEASPASGPRHLMDPHTFYSNFNNKIGRHKTYLCYEVERLDNGTWVKMDQHRGFLHNQPRRHAELLFLDLVPSLQLDPAQIYRVTWFISWSPCFSWGCACEVRAFLQENTHVRLRIFAARIADHWPLYKEALQMLRDAGAQVSIMTYDEFKHCWWTFVDHQGAPFQPWDGLDEHSQALSRRLRAILQNQGN

SEQ ID NO: 613 - protein, 191 aa, synthetic construct
MEASPASGPRHLMDPHTFYSNFNNKIGRHKTYLCYEVERLDNGTWVKMDQHRGFLHNQPRRHAELLFLDLVPSLQLDPAQIYRVTWFISWSPCFSWGCACEVRAFLQENTHVRLRIFAARIADHWPLYKEALQMLRDAGAQVSIMTYDEFKHCWDTFVDHQGAPFQPWDGLDEHWQALSRRLRAILQNQGN

SEQ ID NO: 614 - protein, 191 aa, synthetic construct
MEASPASGPRHLMDPHTFYSNFNNKIGRHKTYLCYEVERLDNGTWVKMDQHRGFLHNQPRRHAELLFLDLVPSLQLDPAQIYRVTWFISWSPCFSWGCACEVRAFLQENTHVRLRIFAARIADHWPLYKEALQMLRDAGAQVSIMTYDEFKHCWDTFVDHQGAPFQPWDGLDEHVQALSRRLRAILQNQGN

SEQ ID NO: 615 - protein, 191 aa, synthetic construct
MEASPASGPRHLMDPHTFYSNFNNKIGRHKTYLCYEVERLDNGTWVKMDQHRGFLHNQPRRHAELLFLDLVPSLQLDPAQIYRVTWFISWSPCFSWGCACEVRAFLQENTHVRLRIFAARIADHWPLYKEALQMLRDAGAQVSIMTYDEFKHCWDTFVDHQGAPFQPWDGLDEHYQALSRRLRAILQNQGN

SEQ ID NO: 616 - protein, 191 aa, synthetic construct
MEASPASGPRHLMDPHTFYSNFNNKIGRHKTYLCYEVERLDNGTWVKMDQHRGFLHNQPRRHAELLFLDLVPSLQLDPAQIYRVTWFISWSPCFSWGCACEVRAFLQENTHVRLRIFAARIADHWPLYKEALQMLRDAGAQVSIMTYDEFKHCWDTFVDHQGAPFQPWDGLDEHFQALSRRLRAILQNQGN

SEQ ID NO: 617 - protein, 191 aa, synthetic construct
MEASPASGPRHLMDPHTFYSNFNNKIGRHKTYLCYEVERLDNGTWVKMDQHRGFLHNQPRRHAELLFLDLVPSLQLDPAQIYRVTWFISWSPCFSWGCACEVRAFLQENTHVRLRIFAARIADHWPLYKEALQMLRDAGAQVSIMTYDEFKHCWDTFVDHQGAPFQPWDGLDEHSQALFRRLRAILQNQGN

SEQ ID NO: 618 - protein, 191 aa, synthetic construct
MEASPASGPRHLMDPHTFYSNFNNKIGRHKTYLCYEVERLDNGTWVKMDQHRGFLHNQPRRHAELLFLDLVPSLQLDPAQIYRVTWFISWSPCFSWGCACEVRAFLQENTHVRLRIFAARIADHWPLYKEALQMLRDAGAQVSIMTYDEFKHCWDTFVDHQGAPFQPWDGLDEHSQALYRRLRAILQNQGN

SEQ ID NO: 619 - protein, 191 aa, synthetic construct
MEASPASGPRHLMDPHTFYSNFNNKIGRHKTYLCYEVERLDNGTWVKMDQHRGFLHNQPRRHAELLFLDLVPSLQLDPAQIYRVTWFISWSPCFSWGCACEVRAFLQENTHVRLRIFAARIADHWPLYKEALQMLRDAGAQVSIMTYDEFKHCWDTFVDHQGAPFQPWDGLDEHSQALQRRLRAILQNQGN

SEQ ID NO: 620 - protein, 191 aa, synthetic construct
MEASPASGPRHLMDPHTFYSNFNNKIGRHKTYLCYEVERLDNGTWVKMDQHRGFLHNQPRRHAELLFLDLVPSLQLDPAQIYRVTWFISWSPCFSWGCACEVRAFLQENTHVRLRIFAARIADHWPLYKEALQMLRDAGAQVSIMTYDEFKHCWDTFVDHQGAPFQPWDGLDEHSQALSRRLRWILQNQGN

SEQ ID NO: 621 - protein, 191 aa, synthetic construct
MEASPASGPRHLMDPHTFYSNFNNKIGRHKTYLCYEVERLDNGTWVKMDQHRGFLHNQPRRHAELLFLDLVPSLQLDPAQIYRVTWFISWSPCFSWGCACEVRAFLQENTHVRLRIFAARIADHWPLYKEALQMLRDAGAQVSIMTYDEFKHCWDTFVDHQGAPFQPWDGLDEHSQALSRRLRIILQNQGN

SEQ ID NO: 622 - protein, 191 aa, synthetic construct
MEASPASGPRHLMDPHTFYSNFNNKIGRHKTYLCYEVERLDNGTWVKMDQHRGFLHNQPRRHAELLFLDLVPSLQLDPAQIYRVTWFISWSPCFSWGCACEVRAFLQENTHVRLRIFAARIADHWPLYKEALQMLRDAGAQVSIMTYDEFKHCWDTFVDHQGAPFQPWDGLDEHSQALSRRLRLILQNQGN

SEQ ID NO: 623 - protein, 191 aa, synthetic construct
MEASPASGPRHLMDPHTFYYNFNNKIGRHKTYLCYEVERLDNGTWVKMDQHRGFLHNQPRRHAELLFLDLVPSLQLDPAQIYRVTWFISWSPCFSWGCACEVRAFLQENTHVRLRIFAARIADHWPLYKEALQMLRDAGAQVSIMTYDEFKHCWDTFVDHQGAPFQPWDGLDEHSQALSRRLRAILQNQGN

SEQ ID NO: 624 - protein, 191 aa, synthetic construct
MEASPASGPRHLMDPHTFYENFNNKIGRHKTYLCYEVERLDNGTWVKMDQHRGFLHNQPRRHAELLFLDLVPSLQLDPAQIYRVTWFISWSPCFSWGCACEVRAFLQENTHVRLRIFAARIADHWPLYKEALQMLRDAGAQVSIMTYDEFKHCWDTFVDHQGAPFQPWDGLDEHSQALSRRLRAILQNQGN

SEQ ID NO: 625 - protein, 191 aa, synthetic construct
MEASPASGPRHLMDPHTFYSNFNNKAGRHKTYLCYEVERLDNGTWVKMDQHRGFLHNQPRRHAELLFLDLVPSLQLDPAQIYRVTWFISWSPCFSWGCACEVRAFLQENTHVRLRIFAARIADHWPLYKEALQMLRDAGAQVSIMTYDEFKHCWDTFVDHQGAPFQPWDGLDEHSQALSRRLRAILQNQGN

SEQ ID NO: 626 - protein, 191 aa, synthetic construct
MEASPASGPRHLMDPHTFYSNFNNKIGRHKTYLCYEVYRLDNGTWVKMDQHRGFLHNQPRRHAELLFLDLVPSLQLDPAQIYRVTWFISWSPCFSWGCACEVRAFLQENTHVRLRIFAARIADHWPLYKEALQMLRDAGAQVSIMTYDEFKHCWDTFVDHQGAPFQPWDGLDEHSQALSRRLRAILQNQGN

SEQ ID NO: 627 - protein, 191 aa, synthetic construct
MEASPASGPRHLMDPHTFYSNFNNKIGRHKTYLCYEVERLDNGTWVKMDQHRGFLHNQPRRHAELLFLDLVPSLQLDPAQIYRVTWFISWSPCFSWGCACEVRAFLQENTHVRLRIFAARIADHWPLYKEALQMLRDAGAQVSIMTYDEFKHCWDTFVDHQGAPFQPWDGLDEHSQALSRRLRKILQNQGN

SEQ ID NO: 628 - protein, 191 aa, synthetic construct
MEASPASGPRHLMDPHTFYSNFNNKIGRHKTYLCYEVERLDNGTWVKMDQHRGFLHNQPRRHAELLFLDLVPSLQLDPAQIYRVTWFISWSPCFSWGCACEVRAFLQENTHVRLRIFAARIADHWPLYKEALQMLRDAGAQVSIMTYDEFKHCWDTFVDHQGAPFQPWDGLDEHSQALSRRLREILQNQGN

SEQ ID NO: 629 - protein, 191 aa, synthetic construct
MEASPASGPRHLMDPHTFYSNFNNKIGRHKTYLCYEVERLDNGTWVKMDQHRGFLHNQPRRHAELLFLDLVPSLQLLPAQIYRVTWFISWSPCFSWGCACEVRAFLQENTHVRLRIFAARIADHWPLYKEALQMLRDAGAQVSIMTYDEFKHCWDTFVDHQGAPFQPWDGLDEHSQALSRRLRAILQNQGN

SEQ ID NO: 630 - protein, 191 aa, synthetic construct
MEASPASGPRHLMDPHTFYSNFNNKIGRHKTYLCYEVERLDNGTWVKMDQHRGFLHNQPRRHAELLFLDLVPSLQLDPAQIYRVTWFIYWSPCFSWGCACEVRAFLQENTHVRLRIFAARIADHWPLYKEALQMLRDAGAQVSIMTYDEFKHCWDTFVDHQGAPFQPWDGLDEHSQALSRRLRAILQNQGN

SEQ ID NO: 631 - protein, 191 aa, synthetic construct
MEASPASGPRHLMDPHTFYSNFNNKIGRHKTYLCYEVERLDNGTWVKMDQHRGFLHNQPRRHAELLFLDLVPSLQLDPAQIYRVTWFISWSPCFSWGCACLVRAFLQENTHVRLRIFAARIADHWPLYKEALQMLRDAGAQVSIMTYDEFKHCWDTFVDHQGAPFQPWDGLDEHSQALSRRLRAILQNQGN

SEQ ID NO: 632 - protein, 191 aa, synthetic construct
MEASPASGPRHLMDPHTFYSNFNNKIGRHKTYLCYEVERLDNGTWVKMDQHRGFLHNQPRRHAELLFLDLVPSLQLDPAQIYRVTWFISWSPCFSWGCACEWRAFLQENTHVRLRIFAARIADHWPLYKEALQMLRDAGAQVSIMTYDEFKHCWDTFVDHQGAPFQPWDGLDEHSQALSRRLRAILQNQGN

SEQ ID NO: 633 - protein, 191 aa, synthetic construct
MEASPASGPRHLMDPHTFYSNFNNKIGRHKTYLCYEVERLDNGTWVKMDQHRGFLHNQPRRHAELLFLDLVPSLQLDPAQIYRVTWFISWSPCFSWGCACEVRAFLQENTHVRLRIFAARIADHWPLYKEGLQMLRDAGAQVSIMTYDEFKHCWDTFVDHQGAPFQPWDGLDEHSQALSRRLRAILQNQGN

SEQ ID NO: 634 - protein, 191 aa, synthetic construct
MEASPASGPRHLMDPHTFYSNFNNKIGRHKTYLCYEVERLDNGTWVKMDQHRGFLHNQPRRHAELLFLDLVPSLQLDPAQIYRVTWFISWSPCFSWGCACEVRAFLQENTHVRLRIFAARIADHWPLYKEALQTLRDAGAQVSIMTYDEFKHCWDTFVDHQGAPFQPWDGLDEHSQALSRRLRAILQNQGN

SEQ ID NO: 635 - protein, 191 aa, synthetic construct
MEASPASGPRHLMDPHTFYSNFNNKIGRHKTYLCYEVERLDNGTWVKMDQHRGFLHNQPRRHAELLFLDLVPSLQLDPAQIYRVTWFISWSPCFSWGCACEVAAFLQENTHVRLRIFAARIADHWPLYKEALQMLRDAGAQVSIMTYDEFKHCWDTFVDHQGAPFQPWDGLDEHSQALSRRLRAILQNQGN

SEQ ID NO: 636 - protein, 191 aa, synthetic construct
MEASPASGPRHLMDPHTFYSNFNNKIGRHKTYLCYEVERLDNGTWVKMDQHRGFLHNQPRRHAELLFLDLVPSLQLDPAQIYRVTWFISWSPCFSWGCACEVRAFLQENTHVRLRIFAARIADHWPLYKEALQALRDAGAQVSIMTYDEFKHCWDTFVDHQGAPFQPWDGLDEHSQALSRRLRAILQNQGN

SEQ ID NO: 637 - protein, 191 aa, synthetic construct
MEASPASGPRHLMDPHTFYSNFNNKIGRHKTYLCYEVERLDGGTWVKMDQHRGFLHNQPRRHAELLFLDLVPSLQLDPAQIYRVTWFISWSPCFSWGCACEVRAFLQENTHVRLRIFAARIADHWPLYKEALQMLRDAGAQVSIMTYDEFKHCWDTFVDHQGAPFQPWDGLDEHSQALSRRLRAILQNQGN

SEQ ID NO: 638 - protein, 191 aa, synthetic construct
MEASPASGPRHLMDPHTFYSNFNNKIGRHKTYLCYEVERLDNGTWVKMDQHRGFLHNQPRRHAELLFLDLVPSLQLDPAQIYRVTWFISWSPCFSWGCACEVRAFLQENTHVRLRIFAARIADHWPLYKEALQMLRDAGAQVSIMTYDEFRHCWDTFVDHQGAPFQPWDGLDEHSQALSRRLRAILQNQGN

SEQ ID NO: 639 - protein, 191 aa, synthetic construct
MEASPASGPRHLMDPHTFYSNFNNKIGRHKTYLCYEVERLDNGTWVKMDQHRGFLHNQPRRHAELLFLDLVPSLQLDPAQIYRVTWFISWSPCFSWGCACEVVAFLQENTHVRLRIFAARIADHWPLYKEALQMLRDAGAQVSIMTYDEFKHCWDTFVDHQGAPFQPWDGLDEHSQALSRRLRAILQNQGN

SEQ ID NO: 640 - protein, 191 aa, synthetic construct
MEASPASGPRHLMDPHTFYSNFNNKIGRHKTYLCYEVERLDNGTWVKMDQHRGFLHNQPGRHAELLFLDLVPSLQLDPAQIYRVTWFISWSPCFSWGCACEVRAFLQENTHVRLRIFAARIADHWPLYKEALQMLRDAGAQVSIMTYDEFKHCWDTFVDHQGAPFQPWDGLDEHSQALSRRLRAILQNQGN

SEQ ID NO: 641 - protein, 191 aa, synthetic construct
MEASPASGPRHLMDPHTFYSNFNNKIGRHKTYLCYEVERLDNGTWVKMDQHRGFLHNQPRRHAELLFLDLVPSLQLDPAQIYRVTWFISWSPCFSWGCACEVRAFLQENTHVRLRIFAARIADHWPLYKEALQRLRDAGAQVSIMTYDEFKHCWDTFVDHQGAPFQPWDGLDEHSQALSRRLRAILQNQGN

SEQ ID NO: 642 - protein, 191 aa, synthetic construct
MEASPASGPRHLMDPHTFYSNFNNKIGRHKTYLCYEVERLDNGTWVKMDQHRGFLHNQPRRHAELLFLDLVPSLQLDPAQIYRVTWFISWSPCFSWGCACEVRAFLQENTHVRLRIFAARIADHWPLYKEALQMLRDAGAQVSIMTYPEFKHCWDTFVDHQGAPFQPWDGLDEHSQALSRRLRAILQNQGN

SEQ ID NO: 643 - protein, 191 aa, synthetic construct
MEASPASGPRHLMDPHTFYSNFNNKIGRHKTYLCYEVERLDDGTWVKMDQHRGFLHNQPRRHAELLFLDLVPSLQLDPAQIYRVTWFISWSPCFSWGCACEVRAFLQENTHVRLRIFAARIADHWPLYKEALQMLRDAGAQVSIMTYDEFKHCWDTFVDHQGAPFQPWDGLDEHSQALSRRLRAILQNQGN

SEQ ID NO: 644 - protein, 191 aa, synthetic construct
MEASPASGPRHLMDPHTFYSNFNNKIGRHKTYLLYEVERLDNGTWVKMDQHRGFLHNQPRRHAELLFLDLVPSLQLDPAQIYRVTWFISWSPCFSWGCACEVRAFLQENTHVRLRIFAARIADHWPLYKEALQMLRDAGAQVSIMTYDEFKHCWDTFVDHQGAPFQPWDGLDEHSQALSRRLRAILQNQGN

SEQ ID NO: 645 - protein, 191 aa, synthetic construct
MEASPASGPRHLMDPHTFYSNFNNKIGRHKTYLCYEVERLDNGTWVKMDQHRGFLHNQPRRHAELLFLDLVPSLQLDPAQIYRVTWFISWSPCFSWGCACEVRAFLQENTHVRLRIFAARIADHWPLYKEALQMLRDAGAQVSIMTYDEFKHCWDTFVDHQGAPFQPWDGLWEHSQALSRRLRAILQNQGN

SEQ ID NO: 646 - protein, 191 aa, synthetic construct
MEASPASGPRHLMDPHTFYHNFNNKIGRHKTYLCYEVERLDNGTWVKMDQHRGFLHNQPRRHAELLFLDLVPSLQLDPAQIYRVTWFISWSPCFSWGCACEVRAFLQENTHVRLRIFAARIADHWPLYKEALQMLRDAGAQVSIMTYDEFKHCWDTFVDHQGAPFQPWDGLDEHSQALSRRLRAILQNQGN

SEQ ID NO: 647 - protein, 191 aa, synthetic construct
MEASPASGPRHLMDPHTFYINFNNKIGRHKTYLCYEVERLDNGTWVKMDQHRGFLHNQPRRHAELLFLDLVPSLQLDPAQIYRVTWFISWSPCFSWGCACEVRAFLQENTHVRLRIFAARIADHWPLYKEALQMLRDAGAQVSIMTYDEFKHCWDTFVDHQGAPFQPWDGLDEHSQALSRRLRAILQNQGN

SEQ ID NO: 648 - protein, 179 aa, synthetic construct
MDPHTFYSNFNNKIGRHKTYLCYEVERLDNGTWVKMDQHRGFLHNQPRRHAELLFLDLVPSLQLDPAQIYRVTWFISWSPCFSWGCACEVRAFLQENTHVRLRIFAARIADHWPLYKEALQMLRDAGAQVSIMTYDEFKHCWDTFVDHQGAPFQPWDGLDEHSQALSRRLRAILQNQGN

SEQ ID NO: 649 - protein, 189 aa, synthetic construct; identical to SEQ ID NO: 77

SEQ ID NO: 650 - protein, 189 aa, synthetic construct
MEASPASGPRHLMDPHTFYSNFNNKIGRHKTYLCYEVERLDNGTWVKMDQHRGFLHNQPRRHAELLFLDLVPSLQLDPAQIYRVTWFISWSPCRNCACEVRAFLQENTHVRLRIFAARIADHWPLYKEALQMLRDAGAQVSIMTYDEFKHCWDTFVDHQGAPFQPWDGLDEHSQALSRRLRAILQNQGN

SEQ ID NO: 651 - protein, 177 aa, synthetic construct
MDPHTFYSNFNNKIGRHKTYLCYEVERLDNGTWVKMDQHRGFLHNQPRRHAELLFLDLVPSLQLDPAQIYRVTWFISWSPCFSCACEVRAFLQENTHVRLRIFAARIADHWPLYKEALQMLRDAGAQVSIMTYDEFKHCWDTFVDHQGAPFQPWDGLDEHSQALSRRLRAILQNQGN

SEQ ID NO: 652 - protein, 177 aa, synthetic construct
MDPHTFYSNFNNKIGRHKTYLCYEVERLDNGTWVKMDQHRGFLHNQPRRHAELLFLDLVPSLQLDPAQIYRVTWFISWSPCRNCACEVRAFLQENTHVRLRIFAARIADHWPLYKEALQMLRDAGAQVSIMTYDEFKHCWDTFVDHQGAPFQPWDGLDEHSQALSRRLRAILQNQGN

SEQ ID NO: 653 - protein, 188 aa, synthetic construct
MEASPASGPRHLMDPHTFYSNFNNKIGRHKTYLCYEVERLDNGTWVKMDQHRGFLHNQPRRHAELLFLDLVPSLQLDPAQIYRVTWFISWSPCFSWGCACEVRAFLQENTHVRLRIFAARIADHWPEALQMLRDAGAQVSIMTYDEFKHCWDTFVDHQGAPFQPWDGLDEHSQALSRRLRAILQNQGN

SEQ ID NO: 654 - protein, 190 aa, synthetic construct
MEASPASGPRHLMDPHTFYSNFNNKIGRHKTYLCYEVERLDNGTWVKMDQHRGFLHNQPRRHAELLFLDLVPSLQLDPAQIYRVTWFISWSPCFSWGCACEVRAFLQENTHVRLRIFAARIADHWPLYKEALQMLRDAGAQVSIMTYDEFKHCWDTFVDHQGAFQPWDGLDEHSQALSRRLRAILQNQGN

SEQ ID NO: 655 - protein, 190 aa, synthetic construct
MEASPASGPRHLMDPHTFYSNFNNKIGRHKTYLCYEVERLDNGTWVKMDQHRGFLHNQPRRHAELLFLDLVPSLQLDPAQIYRVTWFISWSPCFSWGCACEVRAFLQENTHVRLRIFAARIADHWPLYKEALQMLRDAGAQVSIMTYDEFKHCWDTFVDHQGLYQPWDGLDEHSQALSRRLRAILQNQGN

SEQ ID NO: 656 - protein, 190 aa, synthetic construct
MEASPASGPRHLMDPHTFYSNFNNKIGRHKTYLCYEVERLDNGTWVKMDQHRGFLHNQPRRHAELLFLDLVPSLQLDPAQIYRVTWFISWSPCFSWGCACEVRAFLQENTHVRLRIFAARIADHWPLYKEALQMLRDAGAQVSIMTYDEFKHCWDTFVDHQRLYKPWDGLDEHSQALSRRLRAILQNQGN

SEQ ID NO: 657 - protein, 187 aa, synthetic construct
MEASPASGPRHLMDPHTFYSNFNNKIGRHKTYLCYEVERLDNGTWVKMDQHRGFLHNQPRRHAELLFLDLVPSLQLDPAQIYRVTWFISWSPCFSWGCACEVRAFLQENTHVRLRIFAARIADHWPLYKEALQMLRDAGAQVSIMTYDEFKHCWDTFVDHQGAPFQPWDGLDEHSQALSRRLRAILQ

SEQ ID NO: 658 - protein, 180 aa, synthetic construct
MDQNIFRFNFINDASVRGQKQTYLCYEVELLDGNSWVPLDEGRGFLLNQPRRHAELCFLDRVSSWHLDPTKHYKFTWFLSWSPCRNCAQEVVAFLGGNSHVSLSIFAPRIADHWSGYEEGLRSLQGAGAHVSIMTSTEFEHCWRTFVDNRGCPFVPWNRLGENSQTISRRLQSILQNGNN

SEQ ID NO: 659 - protein, 180 aa, synthetic construct
MDQNTFYFNFINKASVRGQKQTYLCYEVELLDGNSWVPLDEGRGFLLNQPRRHAELLFLDRVSSWHLDPTKHYKFTWFLSWSPCRNCACEVVAFLGGNSHVSLSIFAPRIYDYYSGYEEGLRSLQGAGAHVSIMTSTEFEHCWRTFVDNRGAPFVPWNRLGENSQTISRRLQSILQNGNN

SEQ ID NO: 660 - protein, 191 aa, synthetic construct
MEASPASGPRHLMDPHTFYSNFNNKIGRHKTYLCYEVERLDNGTWVKMDQHRGFLHNQPRRHAELLFLDLVPSLQLDPAQRYRVTWFISWSPCFSWGCACEVRAFLQENTHVRLRIFAARIADHWPLYKEALQMLRDAGAQVSIMTYDEFKHCWDTFVDHQGAPFQPWDGLDEHSQALSRRLRAILQNQGN

SEQ ID NO: 661 - protein, 191 aa, synthetic construct
MEASPASGPRHLMDPHTFYSNFNNKIGRHKTYLCYEVERLDNGTWVKMDQHRGFLHNQPRRHAELLFLDLVPSLQLDPAQIYRVTWFISWSPCFSWGCACEVRAFLQENTHVRLRIFAARIADHWPLYKEALQMLRDAGAQVSIMTYDEFKHCWDTFVDHQGRPFQPWDGLDEHSQALSRRLRAILQNQGN

SEQ ID NO: 662 - protein, 191 aa, synthetic construct
MEASPASGPRHLMDPHTFYSNFNNKIGRRKTYLCYEVERLDNGTWVKMDQHRGFLHNQPRRHAELLFLDLVPSLQLDPAQIYRVTWFISWSPCFSWGCACEVRAFLQENTHVRLRIFAARIADHWPLYKEALQMLRDAGAQVSIMTYDEFKHCWDTFVDHQGAPFQPWDGLDEHSQALSRRLRAILQNQGN

SEQ ID NO: 663 - protein, 191 aa, synthetic construct
MEASPASGPRHLMDPHTFYSNFNNKIRRHKTYLCYEVERLDNGTWVKMDQHRGFLHNQPRRHAELLFLDLVPSLQLDPAQIYRVTWFISWSPCFSWGCACEVRAFLQENTHVRLRIFAARIADHWPLYKEALQMLRDAGAQVSIMTYDEFKHCWDTFVDHQGAPFQPWDGLDEHSQALSRRLRAILQNQGN

SEQ ID NO: 664 - protein, 175 aa, synthetic construct
MDQDTFWSNFANKERKTYLCYEVELLDGNSWVLLEEGRGFLHNQLRRHAELCFLDRVPSWQLDPAKRYRVTWLLSWSPCTDCARDLVTFLQHNSHVSLRIFTARIATHWKGYEEGLRSLQGAGAHLAIMTSTEFEHCWGTFVHNQGTPFEPWNGLDENSQEESMKLQRILQNEDN

SEQ ID NO: 665 - protein, 175 aa, synthetic construct
MDQDTFWSNFANKERKTYLCYEVELLDGNSWVLLEEGRGFLHNQLRRHAELLFLDRVPSWQLDPAKRYRVTWLLSWSPCTDCACDLVTFLQHNSHVSLRIFTARIATHWKGYEEGLRSLQGAGAHLAIMTSTEFEHCWGTFVHNQGAPFEPWNGLDENSQEESRKLQRILQNEDN

SEQ ID NO: 666 - protein, 191 aa, synthetic construct
MEASPASGPRHLMDPHTFYSNFNNKIGRHKTYLCYEVERLDNGTWVKEDQHRGFLHNQPRRHAELLFLDLVPSLQLDPAQIYRVTWFISWSPCFSWGCACEVRAFLQENTHVRLRIFAARIADHWPLYKEALQMLRDAGAQVSIMTYDEFKHCWDTFVDHQGAPFQPWDGLDEHSQALSRRLRAILQNQGN

SEQ ID NO: 667 - protein, 191 aa, synthetic construct
MEASPASGPRHLMDPHTFYSNFNNKIGRHKTYLCYEVERLDNGTWVKKDQHRGFLHNQPRRHAELLFLDLVPSLQLDPAQIYRVTWFISWSPCFSWGCACEVRAFLQENTHVRLRIFAARIADHWPLYKEALQMLRDAGAQVSIMTYDEFKHCWDTFVDHQGAPFQPWDGLDEHSQALSRRLRAILQNQGN

SEQ ID NO: 668 - protein, 191 aa, synthetic construct
MEASPASGPRHLMDPHTFYSNFNNKIGRHKTYLCYEVERLDNGTWVKQDQHRGFLHNQPRRHAELLFLDLVPSLQLDPAQIYRVTWFISWSPCFSWGCACEVRAFLQENTHVRLRIFAARIADHWPLYKEALQMLRDAGAQVSIMTYDEFKHCWDTFVDHQGAPFQPWDGLDEHSQALSRRLRAILQNQGN

SEQ ID NO: 669 - protein, 191 aa, synthetic construct
MEASPASGPRHLMDPHTFYSNFNNKIGRHKTYLCYEVERLDNGTWVKSDQHRGFLHNQPRRHAELLFLDLVPSLQLDPAQIYRVTWFISWSPCFSWGCACEVRAFLQENTHVRLRIFAARIADHWPLYKEALQMLRDAGAQVSIMTYDEFKHCWDTFVDHQGAPFQPWDGLDEHSQALSRRLRAILQNQGN

SEQ ID NO: 670 - protein, 191 aa, synthetic construct
MEASPASGPRHLMDPHTFYSNFNNKIGRHKTYLCYEVERLDNGTWVKLDQHRGFLHNQPRRHAELLFLDLVPSLQLDPAQIYRVTWFISWSPCFSWGCACEVRAFLQENTHVRLRIFAARIADHWPLYKEALQMLRDAGAQVSIMTYDEFKHCWDTFVDHQGAPFQPWDGLDEHSQALSRRLRAILQNQGN

SEQ ID NO: 671 - protein, 191 aa, synthetic construct
MEASPASGPRHLMDPHTFYSNFNNKIGRHKTYLCYEVERLDNGTWVKDDQHRGFLHNQPRRHAELLFLDLVPSLQLDPAQIYRVTWFISWSPCFSWGCACEVRAFLQENTHVRLRIFAARIADHWPLYKEALQMLRDAGAQVSIMTYDEFKHCWDTFVDHQGAPFQPWDGLDEHSQALSRRLRAILQNQGN

SEQ ID NO: 672 - protein, 191 aa, synthetic construct
MEASPASGPRHLMDPHTFYSNFNNKIGRHKTYLCYEVERLDNGTWVKNDQHRGFLHNQPRRHAELLFLDLVPSLQLDPAQIYRVTWFISWSPCFSWGCACEVRAFLQENTHVRLRIFAARIADHWPLYKEALQMLRDAGAQVSIMTYDEFKHCWDTFVDHQGAPFQPWDGLDEHSQALSRRLRAILQNQGN

SEQ ID NO: 673 - skipped

SEQ ID NO: 674 - protein, 191 aa, synthetic construct
MEASPASGPRHLMDPHTFYSNFNNKIGRHKTYLCYEVERLDNGTWVPMDQHRGFLHNQPRRHAELLFLDLVPSLQLDPAQIYRVTWFISWSPCFSWGCACEVRAFLQENTHVRLRIFAARIADHWPLYKEALQMLRDAGAQVSIMTYDEFKHCWDTFVDHQGAPFQPWDGLDEHSQALSRRLRAILQNQGN

SEQ ID NO: 675 - protein, 191 aa, synthetic construct
MEASPASGPRHAMYPHTFYSNFNNKIGRHKTYLCYEVERLDNGTWVKMDQHRGFLHNQPRRHAELLFLDLVPSLQLDPAQIYRVTWFISWSPCFSWGCACEVRAFLQENTHVRLRIFAARIADHWPLYKEALQMLRDAGAQVSIMTYDEFKHCWDTFVDHQGAPFQPWDGLDEHSQALSRRLRAILQNQGN

SEQ ID NO: 676 - protein, 191 aa, synthetic construct
MEASPASGPRHLMYPHTFYSNFNNKIGRHKTYLCYEVERLDNGTWVKMDQHRGVLHNQPRRHAELLFLDLVPSLQLDPAQIYRVTWFISWSPCFSWGCACEVRAFLQENTHVRLRIFAARIADHWPLYKEALQMLRDAGAQVSIMTYDEFKHCWDTFVDHQGAPFQPWDGLDEHSQALSRRLRAILQNQGN

SEQ ID NO: 677 - protein, 191 aa, synthetic construct
MEASPASGPRHLMYPHTFYSNFNNKIGRHKTYLCYEVERLDNGTWVKMDQHRGFLHNQPRRHAELLFLDLVPSLQLDPAQIYRVTWFISWSPCFSWGCACEVRAFLQENTHVRLRIFAARIADHWPLYKEALQMLRDAGAQVSIMTYDEFKHCWDTFVYHQGAPFQPWDGLDEHSQALSRRLRAILQNQGN

SEQ ID NO: 678 - protein, 191 aa, synthetic construct
MEASPASGPRHLMDPHTFYSNFNNKIGRHKTYLCYEVERLDNGTWVKMDQHRGFLHNQPRRHAELLFLDLVPSLQLDPAQIYRVTWFISWSPCFYWGCACEVRAFLQENTHVRLRIFAARIADHWPLYKEALQMLRDAGAQVSIMTYDEFKHCWDTFVDHQGAPFQPWDGLDEHSQALSRRLRAILQNQGN

SEQ ID NO: 679 - protein, 191 aa, synthetic construct
MEASPASGPRHLMDPHTFYSNFNNKIGRHKTYLCYEVERLDNGTWVKMDQHRGFLHNQPRRHAELLFLDLVPSLQLDPAQIYRVTWFISWSPCFLWGCACEVRAFLQENTHVRLRIFAARIADHWPLYKEALQMLRDAGAQVSIMTYDEFKHCWDTFVDHQGAPFQPWDGLDEHSQALSRRLRAILQNQGN

SEQ ID NO: 680 - protein, 191 aa, synthetic construct
MEASPASGPRHLMDPHTFYSNFNNKIGRHKTYLCYEVERLDNGTWVKMDQHRGFLHNQPRRHAELLFLDLVPSLQLDPAQIYRVTWFISWSPCFMWGCACEVRAFLQENTHVRLRIFAARIADHWPLYKEALQMLRDAGAQVSIMTYDEFKHCWDTFVDHQGAPFQPWDGLDEHSQALSRRLRAILQNQGN

SEQ ID NO: 681 - protein, 191 aa, synthetic construct
MEASPASGPRHLMDPHTFYSNFNNKIGRHKTYLCYEVERLDNGTWVKMDQHRGFLHNQPRRHAELLFLDLVPSLQLDPAQIYRVTWFISWSPCFKWGCACEVRAFLQENTHVRLRIFAARIADHWPLYKEALQMLRDAGAQVSIMTYDEFKHCWDTFVDHQGAPFQPWDGLDEHSQALSRRLRAILQNQGN

SEQ ID NO: 682 - protein, 191 aa, synthetic construct
MEASPASGPRHLMDPHTFYSNFNNKIGRHKTYLCYEVERLDNGTWVKMDQHRGFLHNQPRRHAELLFLDLVPSLQLDPAQIYRVTWFISWSPCFTWGCACEVRAFLQENTHVRLRIFAARIADHWPLYKEALQMLRDAGAQVSIMTYDEFKHCWDTFVDHQGAPFQPWDGLDEHSQALSRRLRAILQNQGN

SEQ ID NO: 683 - protein, 191 aa, synthetic construct
MEASPASGPRHLMDPHTFYSNFNNKIGRHKTYLCYEVERLDNGTWVKMDQHRGFLHNQPRRHAELLFLDLVPSLQLDPAQIYRVTWFISWSPCFIWGCACEVRAFLQENTHVRLRIFAARIADHWPLYKEALQMLRDAGAQVSIMTYDEFKHCWDTFVDHQGAPFQPWDGLDEHSQALSRRLRAILQNQGN

SEQ ID NO: 684 - protein, 191 aa, synthetic construct
MEASPASGPRHLMDPHTFYSNFNNKIGRHKTYLCYEVERLDNGTWVKMDQHRGFLHNQPRRHAELLFLDLVPSLQLDPAQIYRVTWFISWSPCFRWGCACEVRAFLQENTHVRLRIFAARIADHWPLYKEALQMLRDAGAQVSIMTYDEFKHCWDTFVDHQGAPFQPWDGLDEHSQALSRRLRAILQNQGN

SEQ ID NO: 685 - protein, 191 aa, synthetic construct
MEASPASGPRHLMDPHTFYSNFNNKIGRHKTYLCYEVERLDNGTWVKMDQHRGFLHNQPRRHAELLFLDLVPSLQLDPAQIYRVTWFISWSPCFDWGCACEVRAFLQENTHVRLRIFAARIADHWPLYKEALQMLRDAGAQVSIMTYDEFKHCWDTFVDHQGAPFQPWDGLDEHSQALSRRLRAILQNQGN

SEQ ID NO: 686 - protein, 191 aa, synthetic construct
MEASPASGPRHLMDPHTFYSNFNNKIGRHKTYLCYEVERLDNGTWVKMDQHRGFLHNQPRRHAELLFLDLVPSLQLDPAQIYRVTWFISWSPCFQWGCACEVRAFLQENTHVRLRIFAARIADHWPLYKEALQMLRDAGAQVSIMTYDEFKHCWDTFVDHQGAPFQPWDGLDEHSQALSRRLRAILQNQGN

SEQ ID NO: 687 - protein, 191 aa, synthetic construct
MEASPASGPRHLMDPHTFYSNFNNKIGRHKTYLCYEVERLDNGTWVKMDQHRGFLHNQPRRHAELLFLDLVPSLQLDPAQIYRVTWFISWSPCFCWGCACEVRAFLQENTHVRLRIFAARIADHWPLYKEALQMLRDAGAQVSIMTYDEFKHCWDTFVDHQGAPFQPWDGLDEHSQALSRRLRAILQNQGN

SEQ ID NO: 688 - protein, 191 aa, synthetic construct
MEASPASGPRHLMDPHTFYSNFNNKIGRHKTYLCYEVERLDNGTWVKMDQHRGFLHNQPRRHAELLFLDLVPSLQLDPAQIYRVTWFISWSPCFHWGCACEVRAFLQENTHVRLRIFAARIADHWPLYKEALQMLRDAGAQVSIMTYDEFKHCWDTFVDHQGAPFQPWDGLDEHSQALSRRLRAILQNQGN

SEQ ID NO: 689 - protein, 191 aa, synthetic construct
MEASPASGPRHLMDPHTFYSNFNNKIGRHKTYLCYEVERLDNGTWVKMDQHRGFLHNQPRRHAELLFLDLVPSLQLDPAQIYRVTWFISWSPCFSRGCACEVRAFLQENTHVRLRIFAARIADHWPLYKEALQMLRDAGAQVSIMTYDEFKHCWDTFVDHQGAPFQPWDGLDEHSQALSRRLRAILQNQGN

SEQ ID NO: 690 - protein, 191 aa, synthetic construct
MEASPASGPRHLMDPHTFYSNFNNKIGRHKTYLCYEVERLDNGTWVKMDQHRGFLHNQPRRHAELLFLDLVPSLQLDPAQIYRVTWFISWSPCFSLGCACEVRAFLQENTHVRLRIFAARIADHWPLYKEALQMLRDAGAQVSIMTYDEFKHCWDTFVDHQGAPFQPWDGLDEHSQALSRRLRAILQNQGN

SEQ ID NO: 691 - protein, 191 aa, synthetic construct
MEASPASGPRHLMDPHTFYSNFNNKIGRHKTYLCYEVERLDNGTWVKMDQHRGFLHNQPRRHAELLFLDLVPSLQLDPAQIYRVTWFISWSPCFSWWCACEVRAFLQENTHVRLRIFAARIADHWPLYKEALQMLRDAGAQVSIMTYDEFKHCWDTFVDHQGAPFQPWDGLDEHSQALSRRLRAILQNQGN

SEQ ID NO: 692 - protein, 191 aa, synthetic construct
MEASPASGPRHLMDPHTFYSNFNNKIGRHKTYLCYEVERLDNGTWVKMDQHRGFLHNQPRRHAELLFLDLVPSLQLDPAQIYRVTWFISWSPCFSWYCACEVRAFLQENTHVRLRIFAARIADHWPLYKEALQMLRDAGAQVSIMTYDEFKHCWDTFVDHQGAPFQPWDGLDEHSQALSRRLRAILQNQGN

SEQ ID NO: 693 - protein, 191 aa, synthetic construct
MEASPASGPRHLMDPHTFYSNFNNKIGRHKTYLCYEVERLDNGTWVKMDQHRGFLHNQPRRHAELLFLDLVPSLQLDPAQIYRVTWFISWSPCFSWNCACEVRAFLQENTHVRLRIFAARIADHWPLYKEALQMLRDAGAQVSIMTYDEFKHCWDTFVDHQGAPFQPWDGLDEHSQALSRRLRAILQNQGN

SEQ ID NO: 694 - protein, 191 aa, synthetic construct
MEASPASGPRHLMDPHTFYSNFNNKIGRHKTYLCYEVERLDNGTWVKMDQHRGFLHNQPRRHAELLFLDLVPSLQLDPAQIYRVTWFISWSPCFSWKCACEVRAFLQENTHVRLRIFAARIADHWPLYKEALQMLRDAGAQVSIMTYDEFKHCWDTFVDHQGAPFQPWDGLDEHSQALSRRLRAILQNQGN

SEQ ID NO: 695 - protein, 191 aa, synthetic construct
MEASPASGPRHLMDPHTFYSNFNNKIGRHKTYLCYEVERLDNGTWVKMDQHRGFLHNQPRRHAELLFLDLVPSLQLDPAQIYRVTWFISWSPCFSWGCAMEVRAFLQENTHVRLRIFAARIADHWPLYKEALQMLRDAGAQVSIMTYDEFKHCWDTFVDHQGAPFQPWDGLDEHSQALSRRLRAILQNQGN

SEQ ID NO: 696 - protein, 191 aa, synthetic construct
MEASPASGPRHLMDPHTFYSNFNNKIGRHKTYLCYEVERLDNGTWVKMDQHRGFLHNQPRRHAELLFLDLVPSLQLDPAQIYRVTWFISWSPCFSWGCAFEVRAFLQENTHVRLRIFAARIADHWPLYKEALQMLRDAGAQVSIMTYDEFKHCWDTFVDHQGAPFQPWDGLDEHSQALSRRLRAILQNQGN

SEQ ID NO: 697 - protein, 191 aa, synthetic construct
MEASPASGPRHLMDPHTFYSNFNNKIGRHKTYLCYEVERLDNGTWVKMDQHRGFLHNQPRRHAELLFLDLVPSLQLDPAQIYRVTWFISWSPCFSWGCAEEVRAFLQENTHVRLRIFAARIADHWPLYKEALQMLRDAGAQVSIMTYDEFKHCWDTFVDHQGAPFQPWDGLDEHSQALSRRLRAILQNQGN

SEQ ID NO: 698 - protein, 191 aa, synthetic construct
MEASPASGPRHLMDPHTFYSNFNNKIGRHKTYLCYEVERLDNGTWVKMDQHRGFLHNQPRRHAELLFLDLVPSLQLDPAQIYRVTWFISWSPCFSWGCACEVRFFLQENTHVRLRIFAARIADHWPLYKEALQMLRDAGAQVSIMTYDEFKHCWDTFVDHQGAPFQPWDGLDEHSQALSRRLRAILQNQGN

SEQ ID NO: 699 - protein, 191 aa, synthetic construct
MEASPASGPRHLMDPHTFYSNFNNKIGRHKTYLCYEVERLDNGTWVKMDQHRGFLHNQPRRHAELLFLDLVPSLQLDPAQIYRVTWFISWSPCFSWGCACEVRDFLQENTHVRLRIFAARIADHWPLYKEALQMLRDAGAQVSIMTYDEFKHCWDTFVDHQGAPFQPWDGLDEHSQALSRRLRAILQNQGN

SEQ ID NO: 700 - protein, 191 aa, synthetic construct
MEASPASGPRHLMDPHTFYSNFNNKIGRHKTYLCYEVERLDNGTWVKMDQHRGFLHNQPRRHAELLFLDLVPSLQLDPAQIYRVTWFISWSPCFSWGCACEVRHFLQENTHVRLRIFAARIADHWPLYKEALQMLRDAGAQVSIMTYDEFKHCWDTFVDHQGAPFQPWDGLDEHSQALSRRLRAILQNQGN

SEQ ID NO: 701 - protein, 191 aa, synthetic construct
MEASPASGPRHLMDPHTFYSNFNNKIGRHKTYLCYEVERLDNGTWVKMDQHRGFLHNQPRRHAELLFLDLVPSLQLDPAQIYRVTWFISWSPCFSWGCACEVRTFLQENTHVRLRIFAARIADHWPLYKEALQMLRDAGAQVSIMTYDEFKHCWDTFVDHQGAPFQPWDGLDEHSQALSRRLRAILQNQGN

SEQ ID NO: 702 - protein, 191 aa, synthetic construct
MEASPASGPRHLMDPHTFYSNFNNKIGRHKTYLCYEVERLDNGTWVKMDQHRGFLHNQPRRHAELLFLDLVPSLQLDPAQIYRVTWFISWSPCFSWGCACEVRAFGQENTHVRLRIFAARIADHWPLYKEALQMLRDAGAQVSIMTYDEFKHCWDTFVDHQGAPFQPWDGLDEHSQALSRRLRAILQNQGN

SEQ ID NO: 703 - protein, 191 aa, synthetic construct
MEASPASGPRHLMDPHTFYSNFNNKIGRHKTYLCYEVERLDNGTWVKMDQHRGFLHNQPRRHAELLFLDLVPSLQLDPAQIYRVTWFISWSPCFSWGCACEVRAFLKENTHVRLRIFAARIADHWPLYKEALQMLRDAGAQVSIMTYDEFKHCWDTFVDHQGAPFQPWDGLDEHSQALSRRLRAILQNQGN

SEQ ID NO: 704 - protein, 191 aa, synthetic construct
MEASPASGPRHLMDPHTFYSNFNNKIGRHKTYLCYEVERLDNGTWVKMDQHRGFLHNQPRRHAELLFLDLVPSLQLDPAQIYRVTWFISWSPCFSWGCACEVRAFLLENTHVRLRIFAARIADHWPLYKEALQMLRDAGAQVSIMTYDEFKHCWDTFVDHQGAPFQPWDGLDEHSQALSRRLRAILQNQGN

SEQ ID NO: 705 - protein, 191 aa, synthetic construct
MEASPASGPRHLMDPHTFYSNFNNKIGRHKTYLCYEVERLDNGTWVKMDQHRGFLHNQPRRHAELLFLDLVPSLQLDPAQIYRVTWFISWSPCFSWGCACEVRAFLWENTHVRLRIFAARIADHWPLYKEALQMLRDAGAQVSIMTYDEFKHCWDTFVDHQGAPFQPWDGLDEHSQALSRRLRAILQNQGN

SEQ ID NO: 706 - protein, 191 aa, synthetic construct
MEASPASGPRHLMDPHTFYSNFNNKIGRHKTYLCYEVERLDNGTWVKMDQHRGFLHNQPRRHAELLFLDLVPSLQLDPAQIYRVTWFISWSPCFSWGCACEVRAFLMENTHVRLRIFAARIADHWPLYKEALQMLRDAGAQVSIMTYDEFKHCWDTFVDHQGAPFQPWDGLDEHSQALSRRLRAILQNQGN

SEQ ID NO: 707 - protein, 191 aa, synthetic construct
MEASPASGPRHLMDPHTFYSNFNNKIGRHKTYLCYEVERLDNGTWVKMDQHRGFLHNQPRRHAELLFLDLVPSLQLDPAQIYRVTWFISWSPCFSWGCACEVRAFLYENTHVRLRIFAARIADHWPLYKEALQMLRDAGAQVSIMTYDEFKHCWDTFVDHQGAPFQPWDGLDEHSQALSRRLRAILQNQGN

SEQ ID NO: 708 - protein, 191 aa, synthetic construct
MEASPASGPRHLMDPHTFYSNFNNKIGRHKTYLCYEVERLDNGTWVKMDQHRGFLHNQPRRHAELLFLDLVPSLQLDPAQIYRVTWFISWSPCFSWGCACEVRAFLCENTHVRLRIFAARIADHWPLYKEALQMLRDAGAQVSIMTYDEFKHCWDTFVDHQGAPFQPWDGLDEHSQALSRRLRAILQNQGN

SEQ ID NO: 709 - protein, 191 aa, synthetic construct
MEASPASGPRHLMDPHTFYSNFNNKIGRHKTYLCYEVERLDNGTWVKMDQHRGFLHNQPRRHAELLFLDLVPSLQLDPAQIYRVTWFISWSPCFSWGCACEVRAFLQLNTHVRLRIFAARIADHWPLYKEALQMLRDAGAQVSIMTYDEFKHCWDTFVDHQGAPFQPWDGLDEHSQALSRRLRAILQNQGN

SEQ ID NO: 710 - protein, 191 aa, synthetic construct
MEASPASGPRHLMDPHTFYSNFNNKIGRHKTYLCYEVERLDNGTWVKMDQHRGFLHNQPRRHAELLFLDLVPSLQLDPAQIYRVTWFISWSPCFSWGCACEVRAFLQFNTHVRLRIFAARIADHWPLYKEALQMLRDAGAQVSIMTYDEFKHCWDTFVDHQGAPFQPWDGLDEHSQALSRRLRAILQNQGN

SEQ ID NO: 711 - protein, 191 aa, synthetic construct
MEASPASGPRHLMDPHTFYSNFNNKIGRHKTYLCYEVERLDNGTWVKMDQHRGFLHNQPRRHAELLFLDLVPSLQLDPAQIYRVTWFISWSPCFSWGCACEVRAFLQVNTHVRLRIFAARIADHWPLYKEALQMLRDAGAQVSIMTYDEFKHCWDTFVDHQGAPFQPWDGLDEHSQALSRRLRAILQNQGN

SEQ ID NO: 712 - protein, 191 aa, synthetic construct
MEASPASGPRHLMDPHTFYSNFNNKIGRHKTYLCYEVERLDNGTWVKMDQHRGFLHNQPRRHAELLFLDLVPSLQLDPAQIYRVTWFISWSPCFSWGCACEVRAFLQEYTHVRLRIFAARIADHWPLYKEALQMLRDAGAQVSIMTYDEFKHCWDTFVDHQGAPFQPWDGLDEHSQALSRRLRAILQNQGN

SEQ ID NO: 713 - protein, 191 aa, synthetic construct
MEASPASGPRHLMDPHTFYSNFNNKIGRHKTYLCYEVERLDNGTWVKMDQHRGFLHNQPRRHAELLFLDLVPSLQLDPAQIYRVTWFISWSPCFSWGCACEVRAFLQENNHVRLRIFAARIADHWPLYKEALQMLRDAGAQVSIMTYDEFKHCWDTFVDHQGAPFQPWDGLDEHSQALSRRLRAILQNQGN

SEQ ID NO: 714 - protein, 191 aa, synthetic construct
MEASPASGPRHLMDPHTFYSNFNNKIGRHKTYLCYEVERLDNGTWVKMDQHRGFLHNQPRRHAELLFLDLVPSLQLDPAQIYRVTWFISWSPCFSWGCACEVRAFLQENKHVRLRIFAARIADHWPLYKEALQMLRDAGAQVSIMTYDEFKHCWDTFVDHQGAPFQPWDGLDEHSQALSRRLRAILQNQGN

SEQ ID NO: 715 - protein, 191 aa, synthetic construct
MEASPASGPRHLMDPHTFYSNFNNKIGRHKTYLCYEVERLDNGTWVKMDQHRGFLHNQPRRHAELLFLDLVPSLQLDPAQIYRVTWFISWSPCFSWGCACEVRAFLQENTHHRLRIFAARIADHWPLYKEALQMLRDAGAQVSIMTYDEFKHCWDTFVDHQGAPFQPWDGLDEHSQALSRRLRAILQNQGN

SEQ ID NO: 716 - protein, 191 aa, synthetic construct
MEASPASGPRHLMDPHTFYSNFNNKIGRHKTYLCYEVERLDNGTWVKMDQHRGFLHNQPRRHAELLFLDLVPSLQLDPAQIYRVTWFISWSPCFSWGCACEVRAFLQENTHNRLRIFAARIADHWPLYKEALQMLRDAGAQVSIMTYDEFKHCWDTFVDHQGAPFQPWDGLDEHSQALSRRLRAILQNQGN

SEQ ID NO: 717 - protein, 191 aa, synthetic construct
MEASPASGPRHLMDPHTFYSNFNNKIGRHKTYLCYEVERLDNGTWVKMDQHRGFLHNQPRRHAELLFLDLVPSLQLDPAQIYRVTWFISWSPCFSWGCACEVRAFLQENTHVRDRIFAARIADHWPLYKEALQMLRDAGAQVSIMTYDEFKHCWDTFVDHQGAPFQPWDGLDEHSQALSRRLRAILQNQGN

SEQ ID NO: 718 - protein, 191 aa, synthetic construct
MEASPASGPRHLMDPHTFYSNFNNKIGRHKTYLCYEVERLDNGTWVKMDQHRGFLHNQPRRHAELLFLDLVPSLQLDPAQIYRVTWFISWSPCFSWGCACEVRAFLQENTHVRLRIFAARIADHWPWYKEALQMLRDAGAQVSIMTYDEFKHCWDTFVDHQGAPFQPWDGLDEHSQALSRRLRAILQNQGN

SEQ ID NO: 719 - protein, 191 aa, synthetic construct
MEASPASGPRHLMDPHTFYSNFNNKIGRHKTYLCYEVERLDNGTWVKMDQHRGFLHNQPRRHAELLFLDLVPSLQLDPAQIYRVTWFISWSPCFSWGCACEVRAFLQENTHVRLRIFAARIADHWPFYKEALQMLRDAGAQVSIMTYDEFKHCWDTFVDHQGAPFQPWDGLDEHSQALSRRLRAILQNQGN

SEQ ID NO: 720 - protein, 191 aa, synthetic construct
MEASPASGPRHLMDPHTFYSNFNNKIGRHKTYLCYEVERLDNGTWVKMDQHRGFLHNQPRRHAELLFLDLVPSLQLDPAQIYRVTWFISWSPCFSWGCACEVRAFLQENTHVRLRIFAARIADHWPRYKEALQMLRDAGAQVSIMTYDEFKHCWDTFVDHQGAPFQPWDGLDEHSQALSRRLRAILQNQGN

SEQ ID NO: 721 - protein, 191 aa, synthetic construct
MEASPASGPRHLMDPHTFYSNFNNKIGRHKTYLCYEVERLDNGTWVKMDQHRGFLHNQPRRHAELLFLDLVPSLQLDPAQIYRVTWFISWSPCFSWGCACEVRAFLQENTHVRLRIFAARIADHWPQYKEALQMLRDAGAQVSIMTYDEFKHCWDTFVDHQGAPFQPWDGLDEHSQALSRRLRAILQNQGN

SEQ ID NO: 722 - protein, 191 aa, synthetic construct
MEASPASGPRHLMDPHTFYSNFNNKIGRHKTYLCYEVERLDNGTWVKMDQHRGFLHNQPRRHAELLFLDLVPSLQLDPAQIYRVTWFISWSPCFSWGCACEVRAFLQENTHVRLRIFAARIADHWPLDKEALQMLRDAGAQVSIMTYDEFKHCWDTFVDHQGAPFQPWDGLDEHSQALSRRLRAILQNQGN

SEQ ID NO: 723 - protein, 191 aa, synthetic construct
MEASPASGPRHLMDPHTFYSNFNNKIGRHKTYLCYEVERLDNGTWVKMDQHRGFLHNQPRRHAELLFLDLVPSLQLDPAQIYRVTWFISWSPCFSWGCACEVRAFLQENTHVRLRIFAARIADHWPLKKEALQMLRDAGAQVSIMTYDEFKHCWDTFVDHQGAPFQPWDGLDEHSQALSRRLRAILQNQGN

SEQ ID NO: 724 - protein, 191 aa, synthetic construct
MEASPASGPRHLMDPHTFYSNFNNKIGRHKTYLCYEVERLDNGTWVKMDQHRGFLHNQPRRHAELLFLDLVPSLQLDPAQIYRVTWFISWSPCFSWGCACEVRAFLQENTHVRLRIFAARIADHWPLWKEALQMLRDAGAQVSIMTYDEFKHCWDTFVDHQGAPFQPWDGLDEHSQALSRRLRAILQNQGN

SEQ ID NO: 725 - protein, 191 aa, synthetic construct
MEASPASGPRHLMDPHTFYSNFNNKIGRHKTYLCYEVERLDNGTWVKMDQHRGFLHNQPRRHAELLFLDLVPSLQLDPAQIYRVTWFISWSPCFSWGCACEVRAFLQENTHVRLRIFAARIADHWPLYKWALQMLRDAGAQVSIMTYDEFKHCWDTFVDHQGAPFQPWDGLDEHSQALSRRLRAILQNQGN

SEQ ID NO: 726 - protein, 191 aa, synthetic construct
MEASPASGPRHLMDPHTFYSNFNNKIGRHKTYLCYEVERLDNGTWVKMDQHRGFLHNQPRRHAELLFLDLVPSLQLDPAQIYRVTWFISWSPCFSWGCACEVRAFLQENTHVRLRIFAARIADHWPLYKRALQMLRDAGAQVSIMTYDEFKHCWDTFVDHQGAPFQPWDGLDEHSQALSRRLRAILQNQGN

SEQ ID NO: 727 - protein, 191 aa, synthetic construct
MEASPASGPRHLMDPHTFYSNFNNKIGRHKTYLCYEVERLDNGTWVKMDQHRGFLHNQPRRHAELLFLDLVPSLQLDPAQIYRVTWFISWSPCFSWGCACEVRAFLQENTHVRLRIFAARIADHWPLYKQALQMLRDAGAQVSIMTYDEFKHCWDTFVDHQGAPFQPWDGLDEHSQALSRRLRAILQNQGN

SEQ ID NO: 728 - protein, 191 aa, synthetic construct
MEASPASGPRHLMDPHTFYSNFNNKIGRHKTYLCYEVERLDNGTWVKMDQHRGFLHNQPRRHAELLFLDLVPSLQLDPAQIYRVTWFISWSPCFSWGCACEVRAFLQENTHVRLRIFAARIADHWPLYKFALQMLRDAGAQVSIMTYDEFKHCWDTFVDHQGAPFQPWDGLDEHSQALSRRLRAILQNQGN

SEQ ID NO: 729 - protein, 191 aa, synthetic construct
MEASPASGPRHLMDPHTFYSNFNNKIGRHKTYLCYEVERLDNGTWVKMDQHRGFLHNQPRRHAELLFLDLVPSLQLDPAQIYRVTWFISWSPCFSWGCACEVRAFLQENTHVRLRIFAARIADHWPLYKIALQMLRDAGAQVSIMTYDEFKHCWDTFVDHQGAPFQPWDGLDEHSQALSRRLRAILQNQGN

SEQ ID NO: 730 - protein, 191 aa, synthetic construct
MEASPASGPRHLMDPHTFYSNFNNKIGRHKTYLCYEVERLDNGTWVKMDQHRGFLHNQPRRHAELLFLDLVPSLQLDPAQIYRVTWFISWSPCFSWGCACEVRAFLQENTHVRLRIFAARIADHWPLYKLALQMLRDAGAQVSIMTYDEFKHCWDTFVDHQGAPFQPWDGLDEHSQALSRRLRAILQNQGN

SEQ ID NO: 731 - protein, 191 aa, synthetic construct
MEASPASGPRHLMDPHTFYSNFNNKIGRHKTYLCYEVERLDNGTWVKMDQHRGFLHNQPRRHAELLFLDLVPSLQLDPAQIYRVTWFISWSPCFSWGCACEVRAFLQENTHVRLRIFAARIADHWPLYKAALQMLRDAGAQVSIMTYDEFKHCWDTFVDHQGAPFQPWDGLDEHSQALSRRLRAILQNQGN

SEQ ID NO: 732 - protein, 191 aa, synthetic construct
MEASPASGPRHLMDPHTFYSNFNNKIGRHKTYLCYEVERLDNGTWVKMDQHRGFLHNQPRRHAELLFLDLVPSLQLDPAQIYRVTWFISWSPCFSWGCACEVRAFLQENTHVRLRIFAARIADHWPLYKEVLQMLRDAGAQVSIMTYDEFKHCWDTFVDHQGAPFQPWDGLDEHSQALSRRLRAILQNQGN

SEQ ID NO: 733 - protein, 191 aa, synthetic construct
MEASPASGPRHLMDPHTFYSNFNNKIGRHKTYLCYEVERLDNGTWVKMDQHRGFLHNQPRRHAELLFLDLVPSLQLDPAQIYRVTWFISWSPCFSWGCACEVRAFLQENTHVRLRIFAARIADHWPLYKEQLQMLRDAGAQVSIMTYDEFKHCWDTFVDHQGAPFQPWDGLDEHSQALSRRLRAILQNQGN

SEQ ID NO: 734 - protein, 191 aa, synthetic construct
MEASPASGPRHLMDPHTFYSNFNNKIGRHKTYLCYEVERLDNGTWVKMDQHRGFLHNQPRRHAELLFLDLVPSLQLDPAQIYRVTWFISWSPCFSWGCACEVRAFLQENTHVRLRIFAARIADHWPLYKEALQWLRDAGAQVSIMTYDEFKHCWDTFVDHQGAPFQPWDGLDEHSQALSRRLRAILQNQGN

SEQ ID NO: 735 - protein, 191 aa, synthetic construct
MEASPASGPRHLMDPHTFYSNFNNKIGRHKTYLCYEVERLDNGTWVKMDQHRGFLHNQPRRHAELLFLDLVPSLQLDPAQIYRVTWFISWSPCFSWGCACEVRAFLQENTHVRLRIFAARIADHWPLYKEALQMLRRAGAQVSIMTYDEFKHCWDTFVDHQGAPFQPWDGLDEHSQALSRRLRAILQNQGN

SEQ ID NO: 736 - protein, 191 aa, synthetic construct
MEASPASGPRHLMDPHTFYSNFNNKIGRHKTYLCYEVERLDNGTWVKMDQHRGFLHNQPRRHAELLFLDLVPSLQLDPAQIYRVTWFISWSPCFSWGCACEVRAFLQENTHVRLRIFAARIADHWPLYKEALQMLRDEGAQVSIMTYDEFKHCWDTFVDHQGAPFQPWDGLDEHSQALSRRLRAILQNQGN

SEQ ID NO: 737 - protein, 191 aa, synthetic construct
MEASPASGPRHLMDPHTFYSNFNNKIGRHKTYLCYEVERLDNGTWVKMDQHRGFLHNQPRRHAELLFLDLVPSLQLDPAQIYRVTWFISWSPCFSWGCACEVRAFLQENTHVRLRIFAARIADHWPLYKPALQMLRDAGAQVSIMTYDEFKHCWDTFVDHQGAPFQPWDGLDEHSQALSRRLRAILQNQGN

SEQ ID NO: 738 - protein, 191 aa, synthetic construct
MEASPASGPRHLMDPHTFYSNFNNKIGRHKTYLCYEVERLDNGTWVKMDQHRGFLHNQPRRHAELLFLDLVPSLQLDPAQIYRVTWFISWSPCFSWGCACEVRAFLQENTHVRLRIFAARIADHWPLYKMALQMLRDAGAQVSIMTYDEFKHCWDTFVDHQGAPFQPWDGLDEHSQALSRRLRAILQNQGN

SEQ ID NO: 739 - protein, 191 aa, synthetic construct
MEASPASGPRHLMDPHTFYSNFNNKIGRHKTYLCYEVERLDNGTWVKMDQHRGFLHNQPRRHAELLFLDLVPSLQLDPAQIYRVTWFISWSPCNSWGCACEVRAFLQENTHVRLRIFAARIADHWPLYKEALQMLRDAGAQVSIMTYDEFKHCWDTFVDHQGAPFQPWDGLDEHSQALSRRLRAILQNQGN

SEQ ID NO: 740 - protein, 191 aa, synthetic construct
MEASPASGPRHLMDPHTFYSNFNNKIGRHKTYLCYEVERLDNGTWVKMDQHRGFLHNQPRRHAELLFLDLVPSLQLDPAQIYRVTWFISWSPCFSWGCAKEVRAFLQENTHVRLRIFAARIADHWPLYKEALQMLRDAGAQVSIMTYDEFKHCWDTFVDHQGAPFQPWDGLDEHSQALSRRLRAILQNQGN

SEQ ID NO: 741 - protein, 191 aa, synthetic construct
MEASPASGPRHLMDPHTFYSNFNNKIGRHKTYLCYEVERLDNGTWVKMDQHRGFLHNQPRRHAELLFLDLVPSLQLDPAQIYRVTWFISWSPCFSWGCACTVRAFLQENTHVRLRIFAARIADHWPLYKEALQMLRDAGAQVSIMTYDEFKHCWDTFVDHQGAPFQPWDGLDEHSQALSRRLRAILQNQGN

SEQ ID NO: 742 - protein, 191 aa, synthetic construct
MEASPASGPRHLMDPHTFYSNFNNKIGRHKTYLCYEVERLDNGTWVKMDQHRGFLHNQPRRHAELLFLDLVPSLQLDPAQIYRVTWFISWSPCFSWGCACEVEAFLQENTHVRLRIFAARIADHWPLYKEALQMLRDAGAQVSIMTYDEFKHCWDTFVDHQGAPFQPWDGLDEHSQALSRRLRAILQNQGN

SEQ ID NO: 743 - protein, 191 aa, synthetic construct
MEASPASGPRHLMDPHTFYSNFNNKIGRHKTYLCYEVERLDNGTWVKMDQHRGFLHNQPRRHAELLFLDLVPSLQLDPAQIYRVTWFISWSPCFSWGCACEVQAFLQENTHVRLRIFAARIADHWPLYKEALQMLRDAGAQVSIMTYDEFKHCWDTFVDHQGAPFQPWDGLDEHSQALSRRLRAILQNQGN

SEQ ID NO: 744 - protein, 191 aa, synthetic construct
MEASPASGPRHLMDPHTFYSNFNNKIGRHKTYLCYEVERLDNGTWVKMDQHRGFLHNQPRRHAELLFLDLVPSLQLDPAQIYRVTWFISWSPCFSWGCACEVRYFLQENTHVRLRIFAARIADHWPLYKEALQMLRDAGAQVSIMTYDEFKHCWDTFVDHQGAPFQPWDGLDEHSQALSRRLRAILQNQGN

SEQ ID NO: 745 - protein, 191 aa, synthetic construct
MEASPASGPRHLMDPHTFYSNFNNKIGRHKTYLCYEVERLDNGTWVKMDQHRGFLHNQPRRHAELLFLDLVPSLQLDPAQIYRVTWFISWSPCFSWGCACEVRAFLQENTHVRLRIFAARIADHWPLYKEALQLLRDAGAQVSIMTYDEFKHCWDTFVDHQGAPFQPWDGLDEHSQALSRRLRAILQNQGN

SEQ ID NO: 746 - protein, 191 aa, synthetic construct
MEASPASGPRHLMDPHTFYSNFNNKIGRHKTYLCYEVERLDNGTWVKMDQHRGFLHNQPRRHAELLFLDLVPSLQLDPAQIYRVTWFISWSPCFSWGCACEVRAFLQENTHVRLRIFAARIADHWPLYKEALQMLRDGGAQVSIMTYDEFKHCWDTFVDHQGAPFQPWDGLDEHSQALSRRLRAILQNQGN

SEQ ID NO: 747 - protein, 191 aa, synthetic construct
MEASPASGPRHLMDPHTFYSNFNNKIGRHKTYLCYEVERLDNGTWVKMDQHRGFLHNQPRRHAELLFLDLVPSLQLDPAQIYRVTWFISWSPCFSWGCACEVRAFLQENTHVRLRIFSARIADHWPLYKEALQMLRDAGAQVSIMTYDEFKHCWDTFVDHQGAPFQPWDGLDEHSQALSRRLRAILQNQGN

SEQ ID NO: 748 - protein, 191 aa, synthetic construct
MEASPASGPRHLMDPHTFYSNFNNKIGRHKTYLCYEVERLDNGTWVKMDQHRGFLHNQPRRHAELLFLDLVPSLQLDPAQIYRVTWFISWSPCFSWGCASEVRAFLQENTHVRLRIFAARIADHWPLYKEALQMLRDAGAQVSIMTYDEFKHCWDTFVDHQGAPFQPWDGLDEHSQALSRRLRAILQNQGN

SEQ ID NO: 749 - protein, 191 aa, synthetic construct
MEASPASGPRHLMDPHTFYSNFNNKIGRHKTYLCYEVERLDNGTWVKMDQHRGFLHNQPRRHAELLFLDLVPSLQLDPAQIYRVTWFISWSPCFSWGCASEVRAFLQENTHVRLRIFSARIADHWPLYKEALQMLRDAGAQVSIMTYDEFKHCWDTFVDHQGAPFQPWDGLDEHSQALSRRLRAILQNQGN

SEQ ID NO: 750 - protein, 191 aa, synthetic construct
MEASPASGPRHLMDPHTFYSNFNNKIGVHKTYLCYEVERLDNGTWVKMDQHRGFLHNQPRRHAELLFLDLVPSLQLDPAQIYRVTWFISWSPCFSWGCACEVRAFLQENTHVRLRIFAARIADHWPLYKEALQMLRDAGAQVSIMTYDEFKHCWDTFVDHQGAPFQPWDGLDEHSQALSRRLRAILQNQGN

SEQ ID NO: 751 - protein, 191 aa, synthetic construct
MEASPASGPRHWMDPHTFYSNFNNKIGRHKTYLCYEVERLDNGTWVKMDQHRGFLHNQPRRHAELLFLDLVPSLQLDPAQIYRVTWFISWSPCFSWGCACEVRAFLQENTHVRLRIFAARIADHWPLYKEALQMLRDAGAQVSIMTYDEFKHCWDTFVDHQGAPFQPWDGLDEHSQALSRRLRAILQNQGN

SEQ ID NO: 752 - protein, 191 aa, synthetic construct
MEASPASGPRHLMDPHTFYSQFNNKIGRHKTYLCYEVERLDNGTWVKMDQHRGFLHNQPRRHAELLFLDLVPSLQLDPAQIYRVTWFISWSPCFSWGCACEVRAFLQENTHVRLRIFAARIADHWPLYKEALQMLRDAGAQVSIMTYDEFKHCWDTFVDHQGAPFQPWDGLDEHSQALSRRLRAILQNQGN

SEQ ID NO: 753 - protein, 191 aa, synthetic construct
MEASPASGPRELMDPHTFYSNFNNKIGRHKTYLCYEVERLDNGTWVKMDQHRGFLHNQPRRHAELLFLDLVPSLQLDPAQIYRVTWFISWSPCFSWGCACEVRAFLQENTHVRLRIFAARIADHWPLYKEALQMLRDAGAQVSIMTYDEFKHCWDTFVDHQGAPFQPWDGLDEHSQALSRRLRAILQNQGN

SEQ ID NO: 754 - protein, 191 aa, synthetic construct
MEASPASGPRHLMDPHTFYSNFNNKIGRHKTYLCYEVERLDNGTWVKMDQHRGFLRNQPRRHAELLFLDLVPSLQLDPAQIYRVTWFISWSPCFSWGCACEVRAFLQENTHVRLRIFAARIADHWPLYKEALQMLRDAGAQVSIMTYDEFKHCWDTFVDHQGAPFQPWDGLDEHSQALSRRLRAILQNQGN

SEQ ID NO: 755 - protein, 191 aa, synthetic construct
MEASPASGPRHLMDPHTFYSNFNNKIGRHKTYLCYEVERLDNGTWVKMDQHRGFLHNQPRRHAELLFLDLVPWLQLDPAQIYRVTWFISWSPCFSWGCACEVRAFLQENTHVRLRIFAARIADHWPLYKEALQMLRDAGAQVSIMTYDEFKHCWDTFVDHQGAPFQPWDGLDEHSQALSRRLRAILQNQGN

SEQ ID NO: 756 - protein, 190 aa, synthetic construct
MEASPASGPRHLMDPHTFYSNFNNKIGRHKTYLCYEVERLDGTWVKMDQHRGFLHNQPRRHAELLFLDLVPSLQLDPAQIYRVTWFISWSPCFSWGCACEVRAFLQENTHVRLRIFAARIADHWPLYKEALQMLRDAGAQVSIMTYDEFKHCWDTFVDHQGAPFQPWDGLDEHSQALSRRLRAILQNQGN

SEQ ID NO: 757 - protein, 190 aa, synthetic construct
MEASPASGPRHLMDPHTFYSNFNNKIGRHKTYLCYEVERLDPTWVKMDQHRGFLHNQPRRHAELLFLDLVPSLQLDPAQIYRVTWFISWSPCFSWGCACEVRAFLQENTHVRLRIFAARIADHWPLYKEALQMLRDAGAQVSIMTYDEFKHCWDTFVDHQGAPFQPWDGLDEHSQALSRRLRAILQNQGN

SEQ ID NO: 758 - protein, 190 aa, synthetic construct
MEASPASGPRHLMDPHTFYSNFNNKIGRHKTYLCYEVERKDPSWVKMDQHRGFLHNQPRRHAELLFLDLVPSLQLDPAQIYRVTWFISWSPCFSWGCACEVRAFLQENTHVRLRIFAARIADHWPLYKEALQMLRDAGAQVSIMTYDEFKHCWDTFVDHQGAPFQPWDGLDEHSQALSRRLRAILQNQGN

SEQ ID NO: 759 - protein, 191 aa, synthetic construct
MEASPASGPRHLMDPHTFYSNFNNKIGRHKTYLCYEVERLDNGTWVKMDQHRGFLHNQLRRHAELLFLDLVPSLQLDPAQIYRVTWFISWSPCFSWGCACEVRAFLQENTHVRLRIFAARIADHWPLYKEALQMLRDAGAQVSIMTYDEFKHCWDTFVDHQGAPFQPWDGLDEHSQALSRRLRAILQNQGN

SEQ ID NO: 760 - protein, 191 aa, synthetic construct
MEASPASGPRHLMDPHTFYSNFNNKIGRHKTYLCYEVERLDNGTWVKMDQHRGFLHNQAKYHAELLFLDLVPSLQLDPAQIYRVTWFISWSPCFSWGCACEVRAFLQENTHVRLRIFAARIADHWPLYKEALQMLRDAGAQVSIMTYDEFKHCWDTFVDHQGAPFQPWDGLDEHSQALSRRLRAILQNQGN

SEQ ID NO: 761 - protein, 190 aa, synthetic construct
MEASPASGPRHLMDPHTFYSNFNNKIGRHKTYLCYEVERLDNGTWVKMDQHRGFLHNQPRRHAELLFLDLVPSLQLDAQIYRVTWFISWSPCFSWGCACEVRAFLQENTHVRLRIFAARIADHWPLYKEALQMLRDAGAQVSIMTYDEFKHCWDTFVDHQGAPFQPWDGLDEHSQALSRRLRAILQNQGN

SEQ ID NO: 762 - protein, 190 aa, synthetic construct
MEASPASGPRHLMDPHTFYSNFNNKIGRHKTYLCYEVERLDNGTWVKMDQHRGFLHNQPRRHAELLFLDLVPSLQLDGQIYRVTWFISWSPCFSWGCACEVRAFLQENTHVRLRIFAARIADHWPLYKEALQMLRDAGAQVSIMTYDEFKHCWDTFVDHQGAPFQPWDGLDEHSQALSRRLRAILQNQGN

SEQ ID NO: 763 - protein, 189 aa, synthetic construct
MEASPASGPRHLMDPHTFYSNFNNKRHKTYLCYEVERLDNGTWVKMDQHRGFLHNQPRRHAELLFLDLVPSLQLDPAQIYRVTWFISWSPCFSWGCACEVRAFLQENTHVRLRIFAARIADHWPLYKEALQMLRDAGAQVSIMTYDEFKHCWDTFVDHQGAPFQPWDGLDEHSQALSRRLRAILQNQGN

SEQ ID NO: 764 - protein, 189 aa, synthetic construct
MEASPASGPRHLMDPHTFYSNFNNKERKTYLCYEVERLDNGTWVKMDQHRGFLHNQPRRHAELLFLDLVPSLQLDPAQIYRVTWFISWSPCFSWGCACEVRAFLQENTHVRLRIFAARIADHWPLYKEALQMLRDAGAQVSIMTYDEFKHCWDTFVDHQGAPFQPWDGLDEHSQALSRRLRAILQNQGN

SEQ ID NO: 765 - protein, 192 aa, synthetic construct
MEASPASGPRHLMDPHTFYSNFNNGPIGRHKTYLCYEVERLDNGTWVKMDQHRGFLHNQPRRHAELLFLDLVPSLQLDPAQIYRVTWFISWSPCFSWGCACEVRAFLQENTHVRLRIFAARIADHWPLYKEALQMLRDAGAQVSIMTYDEFKHCWDTFVDHQGAPFQPWDGLDEHSQALSRRLRAILQNQGN

SEQ ID NO: 766 - protein, 192 aa, synthetic construct
MEASPASGPRHLMDPHTFYSNFNNDPIGRHKTYLCYEVERLDNGTWVKMDQHRGFLHNQPRRHAELLFLDLVPSLQLDPAQIYRVTWFISWSPCFSWGCACEVRAFLQENTHVRLRIFAARIADHWPLYKEALQMLRDAGAQVSIMTYDEFKHCWDTFVDHQGAPFQPWDGLDEHSQALSRRLRAILQNQGN

SEQ ID NO: 767 - protein, 192 aa, synthetic construct
MEASPASGPRHLMDPHTFYSNFNNEPIGRHKTYLCYEVERLDNGTWVKMDQHRGFLHNQPRRHAELLFLDLVPSLQLDPAQIYRVTWFISWSPCFSWGCACEVRAFLQENTHVRLRIFAARIADHWPLYKEALQMLRDAGAQVSIMTYDEFKHCWDTFVDHQGAPFQPWDGLDEHSQALSRRLRAILQNQGN

SEQ ID NO: 768 - protein, 192 aa, synthetic construct
MEASPASGPRHLMDPHTFYSNFNNRPIGRHKTYLCYEVERLDNGTWVKMDQHRGFLHNQPRRHAELLFLDLVPSLQLDPAQIYRVTWFISWSPCFSWGCACEVRAFLQENTHVRLRIFAARIADHWPLYKEALQMLRDAGAQVSIMTYDEFKHCWDTFVDHQGAPFQPWDGLDEHSQALSRRLRAILQNQGN

SEQ ID NO: 769 - protein, 192 aa, synthetic construct
MEASPASGPRHLMDPHTFYSNFNNKPIGRHKTYLCYEVERLDNGTWVKMDQHRGFLHNQPRRHAELLFLDLVPSLQLDPAQIYRVTWFISWSPCFSWGCACEVRAFLQENTHVRLRIFAARIADHWPLYKEALQMLRDAGAQVSIMTYDEFKHCWDTFVDHQGAPFQPWDGLDEHSQALSRRLRAILQNQGN

SEQ ID NO: 770 - protein, 192 aa, synthetic construct
MEASPASGPRHLMDPHTFYSNFNNDPLGRHKTYLCYEVERLDNGTWVKMDQHRGFLHNQPRRHAELLFLDLVPSLQLDPAQIYRVTWFISWSPCFSWGCACEVRAFLQENTHVRLRIFAARIADHWPLYKEALQMLRDAGAQVSIMTYDEFKHCWDTFVDHQGAPFQPWDGLDEHSQALSRRLRAILQNQGN

SEQ ID NO: 771 - protein, 192 aa, synthetic construct
MEASPASGPRHLMDPHTFYSNFNNEPLGRHKTYLCYEVERLDNGTWVKMDQHRGFLHNQPRRHAELLFLDLVPSLQLDPAQIYRVTWFISWSPCFSWGCACEVRAFLQENTHVRLRIFAARIADHWPLYKEALQMLRDAGAQVSIMTYDEFKHCWDTFVDHQGAPFQPWDGLDEHSQALSRRLRAILQNQGN

SEQ ID NO: 772 - protein, 192 aa, synthetic construct
MEASPASGPRHLMDPHTFYSNFNNRPLGRHKTYLCYEVERLDNGTWVKMDQHRGFLHNQPRRHAELLFLDLVPSLQLDPAQIYRVTWFISWSPCFSWGCACEVRAFLQENTHVRLRIFAARIADHWPLYKEALQMLRDAGAQVSIMTYDEFKHCWDTFVDHQGAPFQPWDGLDEHSQALSRRLRAILQNQGN

SEQ ID NO: 773 - protein, 192 aa, synthetic construct
MEASPASGPRHLMDPHTFYSNFNNKPLGRHKTYLCYEVERLDNGTWVKMDQHRGFLHNQPRRHAELLFLDLVPSLQLDPAQIYRVTWFISWSPCFSWGCACEVRAFLQENTHVRLRIFAARIADHWPLYKEALQMLRDAGAQVSIMTYDEFKHCWDTFVDHQGAPFQPWDGLDEHSQALSRRLRAILQNQGN

SEQ ID NO: 774 - protein, 192 aa, synthetic construct
MEASPASGPRHLMDPHTFYSNFNNGSIGRHKTYLCYEVERLDNGTWVKMDQHRGFLHNQPRRHAELLFLDLVPSLQLDPAQIYRVTWFISWSPCFSWGCACEVRAFLQENTHVRLRIFAARIADHWPLYKEALQMLRDAGAQVSIMTYDEFKHCWDTFVDHQGAPFQPWDGLDEHSQALSRRLRAILQNQGN

SEQ ID NO: 775 - protein, 192 aa, synthetic construct
MEASPASGPRHLMDPHTFYSNFNNDSIGRHKTYLCYEVERLDNGTWVKMDQHRGFLHNQPRRHAELLFLDLVPSLQLDPAQIYRVTWFISWSPCFSWGCACEVRAFLQENTHVRLRIFAARIADHWPLYKEALQMLRDAGAQVSIMTYDEFKHCWDTFVDHQGAPFQPWDGLDEHSQALSRRLRAILQNQGN

SEQ ID NO: 776 - protein, 192 aa, synthetic construct
MEASPASGPRHLMDPHTFYSNFNNKSIGRHKTYLCYEVERLDNGTWVKMDQHRGFLHNQPRRHAELLFLDLVPSLQLDPAQIYRVTWFISWSPCFSWGCACEVRAFLQENTHVRLRIFAARIADHWPLYKEALQMLRDAGAQVSIMTYDEFKHCWDTFVDHQGAPFQPWDGLDEHSQALSRRLRAILQNQGN

SEQ ID NO: 777 - protein, 192 aa, synthetic construct
MEASPASGPRHLMDPHTFYSNFNNGIIGRHKTYLCYEVERLDNGTWVKMDQHRGFLHNQPRRHAELLFLDLVPSLQLDPAQIYRVTWFISWSPCFSWGCACEVRAFLQENTHVRLRIFAARIADHWPLYKEALQMLRDAGAQVSIMTYDEFKHCWDTFVDHQGAPFQPWDGLDEHSQALSRRLRAILQNQGN

SEQ ID NO: 778 - protein, 192 aa, synthetic construct
MEASPASGPRHLMDPHTFYSNFNNEIIGRHKTYLCYEVERLDNGTWVKMDQHRGFLHNQPRRHAELLFLDLVPSLQLDPAQIYRVTWFISWSPCFSWGCACEVRAFLQENTHVRLRIFAARIADHWPLYKEALQMLRDAGAQVSIMTYDEFKHCWDTFVDHQGAPFQPWDGLDEHSQALSRRLRAILQNQGN

SEQ ID NO: 779 - protein, 192 aa, synthetic construct
MEASPASGPRHLMDPHTFYSNFNNKIIGRHKTYLCYEVERLDNGTWVKMDQHRGFLHNQPRRHAELLFLDLVPSLQLDPAQIYRVTWFISWSPCFSWGCACEVRAFLQENTHVRLRIFAARIADHWPLYKEALQMLRDAGAQVSIMTYDEFKHCWDTFVDHQGAPFQPWDGLDEHSQALSRRLRAILQNQGN

SEQ ID NO: 780 - protein, 192 aa, synthetic construct
MEASPASGPRHLMDPHTFYSNFNNGSLGRHKTYLCYEVERLDNGTWVKMDQHRGFLHNQPRRHAELLFLDLVPSLQLDPAQIYRVTWFISWSPCFSWGCACEVRAFLQENTHVRLRIFAARIADHWPLYKEALQMLRDAGAQVSIMTYDEFKHCWDTFVDHQGAPFQPWDGLDEHSQALSRRLRAILQNQGN

SEQ ID NO: 781 - protein, 192 aa, synthetic construct
MEASPASGPRHLMDPHTFYSNFNNDSLGRHKTYLCYEVERLDNGTWVKMDQHRGFLHNQPRRHAELLFLDLVPSLQLDPAQIYRVTWFISWSPCFSWGCACEVRAFLQENTHVRLRIFAARIADHWPLYKEALQMLRDAGAQVSIMTYDEFKHCWDTFVDHQGAPFQPWDGLDEHSQALSRRLRAILQNQGN

SEQ ID NO: 782 - protein, 192 aa, synthetic construct
MEASPASGPRHLMDPHTFYSNFNNKSLGRHKTYLCYEVERLDNGTWVKMDQHRGFLHNQPRRHAELLFLDLVPSLQLDPAQIYRVTWFISWSPCFSWGCACEVRAFLQENTHVRLRIFAARIADHWPLYKEALQMLRDAGAQVSIMTYDEFKHCWDTFVDHQGAPFQPWDGLDEHSQALSRRLRAILQNQGN

SEQ ID NO: 783 - protein, 192 aa, synthetic construct
MEASPASGPRHLMDPHTFYSNFNNGIYGRHKTYLCYEVERLDNGTWVKMDQHRGFLHNQPRRHAELLFLDLVPSLQLDPAQIYRVTWFISWSPCFSWGCACEVRAFLQENTHVRLRIFAARIADHWPLYKEALQMLRDAGAQVSIMTYDEFKHCWDTFVDHQGAPFQPWDGLDEHSQALSRRLRAILQNQGN

SEQ ID NO: 784 - protein, 192 aa, synthetic construct
MEASPASGPRHLMDPHTFYSNFNNEIYGRHKTYLCYEVERLDNGTWVKMDQHRGFLHNQPRRHAELLFLDLVPSLQLDPAQIYRVTWFISWSPCFSWGCACEVRAFLQENTHVRLRIFAARIADHWPLYKEALQMLRDAGAQVSIMTYDEFKHCWDTFVDHQGAPFQPWDGLDEHSQALSRRLRAILQNQGN

SEQ ID NO: 785 - protein, 192 aa, synthetic construct
MEASPASGPRHLMDPHTFYSNFNNKIYGRHKTYLCYEVERLDNGTWVKMDQHRGFLHNQPRRHAELLFLDLVPSLQLDPAQIYRVTWFISWSPCFSWGCACEVRAFLQENTHVRLRIFAARIADHWPLYKEALQMLRDAGAQVSIMTYDEFKHCWDTFVDHQGAPFQPWDGLDEHSQALSRRLRAILQNQGN

SEQ ID NO: 786 - protein, 192 aa, synthetic construct
MEASPASGPRHLMDPHTFYSNFNNGVIGRHKTYLCYEVERLDNGTWVKMDQHRGFLHNQPRRHAELLFLDLVPSLQLDPAQIYRVTWFISWSPCFSWGCACEVRAFLQENTHVRLRIFAARIADHWPLYKEALQMLRDAGAQVSIMTYDEFKHCWDTFVDHQGAPFQPWDGLDEHSQALSRRLRAILQNQGN

SEQ ID NO: 787 - protein, 192 aa, synthetic construct
MEASPASGPRHLMDPHTFYSNFNNDVIGRHKTYLCYEVERLDNGTWVKMDQHRGFLHNQPRRHAELLFLDLVPSLQLDPAQIYRVTWFISWSPCFSWGCACEVRAFLQENTHVRLRIFAARIADHWPLYKEALQMLRDAGAQVSIMTYDEFKHCWDTFVDHQGAPFQPWDGLDEHSQALSRRLRAILQNQGN

SEQ ID NO: 788 - protein, 192 aa, synthetic construct
MEASPASGPRHLMDPHTFYSNFNNKVIGRHKTYLCYEVERLDNGTWVKMDQHRGFLHNQPRRHAELLFLDLVPSLQLDPAQIYRVTWFISWSPCFSWGCACEVRAFLQENTHVRLRIFAARIADHWPLYKEALQMLRDAGAQVSIMTYDEFKHCWDTFVDHQGAPFQPWDGLDEHSQALSRRLRAILQNQGN

SEQ ID NO: 789 - protein, 192 aa, synthetic construct
MEASPASGPRHLMDPHTFYSNFNNGVLGRHKTYLCYEVERLDNGTWVKMDQHRGFLHNQPRRHAELLFLDLVPSLQLDPAQIYRVTWFISWSPCFSWGCACEVRAFLQENTHVRLRIFAARIADHWPLYKEALQMLRDAGAQVSIMTYDEFKHCWDTFVDHQGAPFQPWDGLDEHSQALSRRLRAILQNQGN

SEQ ID NO: 790 - protein, 192 aa, synthetic construct
MEASPASGPRHLMDPHTFYSNFNNDVLGRHKTYLCYEVERLDNGTWVKMDQHRGFLHNQPRRHAELLFLDLVPSLQLDPAQIYRVTWFISWSPCFSWGCACEVRAFLQENTHVRLRIFAARIADHWPLYKEALQMLRDAGAQVSIMTYDEFKHCWDTFVDHQGAPFQPWDGLDEHSQALSRRLRAILQNQGN

SEQ ID NO: 791 - protein, 192 aa, synthetic construct
MEASPASGPRHLMDPHTFYSNFNNKVLGRHKTYLCYEVERLDNGTWVKMDQHRGFLHNQPRRHAELLFLDLVPSLQLDPAQIYRVTWFISWSPCFSWGCACEVRAFLQENTHVRLRIFAARIADHWPLYKEALQMLRDAGAQVSIMTYDEFKHCWDTFVDHQGAPFQPWDGLDEHSQALSRRLRAILQNQGN

SEQ ID NO: 792 - protein, 192 aa, synthetic construct
MEASPASGPRHLMDPHTFYSNFNNKAIGRHKTYLCYEVERLDNGTWVKMDQHRGFLHNQPRRHAELLFLDLVPSLQLDPAQIYRVTWFISWSPCFSWGCACEVRAFLQENTHVRLRIFAARIADHWPLYKEALQMLRDAGAQVSIMTYDEFKHCWDTFVDHQGAPFQPWDGLDEHSQALSRRLRAILQNQGN

SEQ ID NO: 793 - protein, 194 aa, synthetic construct
MEASPASGPRHLMDPHTFYSNFNNVEYGIGRHKTYLCYEVERLDNGTWVKMDQHRGFLHNQPRRHAELLFLDLVPSLQLDPAQIYRVTWFISWSPCFSWGCACEVRAFLQENTHVRLRIFAARIADHWPLYKEALQMLRDAGAQVSIMTYDEFKHCWDTFVDHQGAPFQPWDGLDEHSQALSRRLRAILQNQGN

SEQ ID NO: 794 - protein, 194 aa, synthetic construct
MEASPASGPRHLMDPHTFYSNFNNVEYSIGRHKTYLCYEVERLDNGTWVKMDQHRGFLHNQPRRHAELLFLDLVPSLQLDPAQIYRVTWFISWSPCFSWGCACEVRAFLQENTHVRLRIFAARIADHWPLYKEALQMLRDAGAQVSIMTYDEFKHCWDTFVDHQGAPFQPWDGLDEHSQALSRRLRAILQNQGN

SEQ ID NO: 795 - protein, 194 aa, synthetic construct
MEASPASGPRHLMDPHTFYSNFNNVEYKIGRHKTYLCYEVERLDNGTWVKMDQHRGFLHNQPRRHAELLFLDLVPSLQLDPAQIYRVTWFISWSPCFSWGCACEVRAFLQENTHVRLRIFAARIADHWPLYKEALQMLRDAGAQVSIMTYDEFKHCWDTFVDHQGAPFQPWDGLDEHSQALSRRLRAILQNQGN

SEQ ID NO: 796 - protein, 194 aa, synthetic construct
MEASPASGPRHLMDPHTFYSNFNNAAAKIGRHKTYLCYEVERLDNGTWVKMDQHRGFLHNQPRRHAELLFLDLVPSLQLDPAQIYRVTWFISWSPCFSWGCACEVRAFLQENTHVRLRIFAARIADHWPLYKEALQMLRDAGAQVSIMTYDEFKHCWDTFVDHQGAPFQPWDGLDEHSQALSRRLRAILQNQGN

SEQ ID NO: 797 - protein, 192 aa, synthetic construct
MEASPASGPRHLMDPHTFYSNFNNKIGRHKTYLCYEVERLDNGTWVKMDQHRGFLHNQPRRHAELLFLDLVPSLQLDPAQIYRVTWFISWSPCFSWGCACEVRAFLQENTHVRLRIFAARIAYDHWPLYKEALQMLRDAGAQVSIMTYDEFKHCWDTFVDHQGAPFQPWDGLDEHSQALSRRLRAILQNQGN

SEQ ID NO: 798 - protein, 192 aa, synthetic construct
MEASPASGPRHLMDPHTFYSNFNNKIGRHKTYLCYEVERLDNGTWVKMDQHRGFLHNQPRRHAELLFLDLVPSLQLDPAQIYRVTWFISWSPCFSWGCACEVRAFLQENTHVRLRIFAARIAYHHWPLYKEALQMLRDAGAQVSIMTYDEFKHCWDTFVDHQGAPFQPWDGLDEHSQALSRRLRAILQNQGN

SEQ ID NO: 799 - protein, 192 aa, synthetic construct
MEASPASGPRHLMDPHTFYSNFNNKIGRHKTYLCYEVERLDNGTWVKMDQHRGFLHNQPRRHAELLFLDLVPSLQLDPAQIYRVTWFISWSPCFSWGCACEVRAFLQENTHVRLRIFAARIAYFHWPLYKEALQMLRDAGAQVSIMTYDEFKHCWDTFVDHQGAPFQPWDGLDEHSQALSRRLRAILQNQGN

SEQ ID NO: 800 - protein, 192 aa, synthetic construct
MEASPASGPRHLMDPHTFYSNFNNKIGRHKTYLCYEVERLDNGTWVKMDQHRGFLHNQPRRHAELLFLDLVPSLQLDPAQIYRVTWFISWSPCFSWGCACEVRAFLQENTHVRLRIFAARIAYHWWPLYKEALQMLRDAGAQVSIMTYDEFKHCWDTFVDHQGAPFQPWDGLDEHSQALSRRLRAILQNQGN

SEQ ID NO: 801 - protein, 192 aa, synthetic construct
MEASPASGPRHLMDPHTFYSNFNNKIGRHKTYLCYEVERLDNGTWVKMDQHRGFLHNQPRRHAELLFLDLVPSLQLDPAQIYRVTWFISWSPCFSWGCACEVRAFLQENTHVRLRIFAARIAYFWWPLYKEALQMLRDAGAQVSIMTYDEFKHCWDTFVDHQGAPFQPWDGLDEHSQALSRRLRAILQNQGN

SEQ ID NO: 802 - protein, 192 aa, synthetic construct
MEASPASGPRHLMDPHTFYSNFNNKIGRHKTYLCYEVERLDNGTWVKMDQHRGFLHNQPRRHAELLFLDLVPSLQLDPAQIYRVTWFISWSPCFSWGCACEVRAFLQENTHVRLRIFAARIAYHWDPHYKEALQMLRDAGAQVSIMTYDEFKHCWDTFVDHQGAPFQPWDGLDEHSQALSRRLRAILQNQGN

SEQ ID NO: 803 - protein, 192 aa, synthetic construct
MEASPASGPRHLMDPHTFYSNFNNKIGRHKTYLCYEVERLDNGTWVKMDQHRGFLHNQPRRHAELLFLDLVPSLQLDPAQIYRVTWFISWSPCFSWGCACEVRAFLQENTHVRLRIFAARIAYFWDPHYKEALQMLRDAGAQVSIMTYDEFKHCWDTFVDHQGAPFQPWDGLDEHSQALSRRLRAILQNQGN

SEQ ID NO: 804 - protein, 192 aa, synthetic construct
MEASPASGPRHLMDPHTFYSNFNNKIGRHKTYLCYEVERLDNGTWVKMDQHRGFLHNQPRRHAELLFLDLVPSLQLDPAQIYRVTWFISWSPCFSWGCACEVRAFLQENTHVRLRIFAARIYYHWDPHYKEALQMLRDAGAQVSIMTYDEFKHCWDTFVDHQGAPFQPWDGLDEHSQALSRRLRAILQNQGN

SEQ ID NO: 805 - protein, 192 aa, synthetic construct
MEASPASGPRHLMDPHTFYSNFNNKIGRHKTYLCYEVERLDNGTWVKMDQHRGFLHNQPRRHAELLFLDLVPSLQLDPAQIYRVTWFISWSPCFSWGCACEVRAFLQENTHVRLRIFAARIYYFWDPHYKEALQMLRDAGAQVSIMTYDEFKHCWDTFVDHQGAPFQPWDGLDEHSQALSRRLRAILQNQGN

SEQ ID NO: 806 - protein, 192 aa, synthetic construct
MEASPASGPRHLMDPHTFYSNFNNKIGRHKTYLCYEVERLDNGTWVKMDQHRGFLHNQPRRHAELLFLDLVPSLQLDPAQIYRVTWFISWSPCFSWGCACEVRAFLQENTHVRLRIFAARIAADHWPLYKEALQMLRDAGAQVSIMTYDEFKHCWDTFVDHQGAPFQPWDGLDEHSQALSRRLRAILQNQGN

SEQ ID NO: 807 - protein, 192 aa, synthetic construct
MEASPASGPRHLMDPHTFYSNFNNKIGRHKTYLCYEVERLDNGTWVKMDQHRGFLHNQPRRHAELLFLDLVPSLQLDPAQIYRVTWFISWSPCFSWGCACEVRAFLQENTHVRLRIFAARIADFHWPLYKEALQMLRDAGAQVSIMTYDEFKHCWDTFVDHQGAPFQPWDGLDEHSQALSRRLRAILQNQGN

SEQ ID NO: 808 - protein, 192 aa, synthetic construct
MEASPASGPRHLMDPHTFYSNFNNKIGRHKTYLCYEVERLDNGTWVKMDQHRGFLHNQPRRHAELLFLDLVPSLQLDPAQIYRVTWFISWSPCFSWGCACEVRAFLQENTHVRLRIFAARIAYFWDPLYKEALQMLRDAGAQVSIMTYDEFKHCWDTFVDHQGAPFQPWDGLDEHSQALSRRLRAILQNQGN

SEQ ID NO: 809 - protein, 192 aa, synthetic construct
MEASPASGPRHLMDPHTFYSNFNNKIGRHKTYLCYEVERLDNGTWVKMDQHRGFLHNQPRRHAELLFLDLVPSLQLDPAQIYRVTWFISWSPCFSWGCACEVRAFLQENTHVRLRIFAARIAYFWDPDYKEALQMLRDAGAQVSIMTYDEFKHCWDTFVDHQGAPFQPWDGLDEHSQALSRRLRAILQNQGN

SEQ ID NO: 810 - protein, 192 aa, synthetic construct
MEASPASGPRHLMDPHTFYSNFNNKIGRHKTYLCYEVERLDNGTWVKMDQHRGFLHNQPRRHAELLFLDLVPSLQLDPAQIYRVTWFISWSPCFSWGCACEVRAFLQENTHVRLRIFAARIYYFWDPDYKEALQMLRDAGAQVSIMTYDEFKHCWDTFVDHQGAPFQPWDGLDEHSQALSRRLRAILQNQGN

SEQ ID NO: 811 - protein, 192 aa, synthetic construct
MEASPASGPRHLMDPHTFYSNFNNKIGRHKTYLCYEVERLDNGTWVKMDQHRGFLHNQPRRHAELLFLDLVPSLQLDPAQIYRVTWFISWSPCFSWGCACEVRAFLQENTHVRLRIFAARIADAHWPLYKEALQMLRDAGAQVSIMTYDEFKHCWDTFVDHQGAPFQPWDGLDEHSQALSRRLRAILQNQGN

SEQ ID NO: 812 - protein, 192 aa, synthetic construct
MEASPASGPRHLMDPHTFYSNFNNKIGRHKTYLCYEVERLDNGTWVKMDQHRGFLHNQPRRHAELLFLDLVPSLQLDPAQIYRVTWFISWSPCFSWGCACEVRAFLQENTHVRLRIFAARIADHEWPLYKEALQMLRDAGAQVSIMTYDEFKHCWDTFVDHQGAPFQPWDGLDEHSQALSRRLRAILQNQGN

SEQ ID NO: 813 - protein, 192 aa, synthetic construct
MEASPASGPRHLMDPHTFYSNFNNKIGRHKTYLCYEVERLDNGTWVKMDQHRGFLHNQPRRHAELLFLDLVPSLQLDPAQIYRVTWFISWSPCFSWGCACEVRAFLQENTHVRLRIFAARIADHEEPLYKEALQMLRDAGAQVSIMTYDEFKHCWDTFVDHQGAPFQPWDGLDEHSQALSRRLRAILQNQGN

SEQ ID NO: 814 - protein, 192 aa, synthetic construct
MEASPASGPRHLMDPHTFYSNFNNKIGRHKTYLCYEVERLDNGTWVKMDQHRGFLHNQPRRHAELLFLDLVPSLQLDPAQIYRVTWFISWSPCFSWGCACEVRAFLQENTHVRLRIFAARIADWEEPLYKEALQMLRDAGAQVSIMTYDEFKHCWDTFVDHQGAPFQPWDGLDEHSQALSRRLRAILQNQGN

SEQ ID NO: 815 - protein, 192 aa, synthetic construct
MEASPASGPRHLMDPHTFYSNFNNKIGRHKTYLCYEVERLDNGTWVKMDQHRGFLHNQPRRHAELLFLDLVPSLQLDPAQIYRVTWFISWSPCFSWGCACEVRAFLQENTHVRLRIFAARIAMWEEPLYKEALQMLRDAGAQVSIMTYDEFKHCWDTFVDHQGAPFQPWDGLDEHSQALSRRLRAILQNQGN

SEQ ID NO: 816 - protein, 192 aa, synthetic construct
MEASPASGPRHLMDPHTFYSNFNNKIGRHKTYLCYEVERLDNGTWVKMDQHRGFLHNQPRRHAELLFLDLVPSLQLDPAQIYRVTWFISWSPCFSWGCACEVRAFLQENTHVRLRIFAARIAMWEEPEYKEALQMLRDAGAQVSIMTYDEFKHCWDTFVDHQGAPFQPWDGLDEHSQALSRRLRAILQNQGN

SEQ ID NO: 817 - protein, 192 aa, synthetic construct
MEASPASGPRHLMDPHTFYSNFNNKIGRHKTYLCYEVERLDNGTWVKMDQHRGFLHNQPRRHAELLFLDLVPSLQLDPAQIYRVTWFISWSPCFSWGCACEVRAFLQENTHVRLRIFAARIFMWEEPEYKEALQMLRDAGAQVSIMTYDEFKHCWDTFVDHQGAPFQPWDGLDEHSQALSRRLRAILQNQGN

SEQ ID NO: 818 - protein, 192 aa, synthetic construct
MEASPASGPRHLMDPHTFYSNFNNKIGRHKTYLCYEVERLDNGTWVKMDQHRGFLHNQPRRHAELLFLDLVPSLQLDPAQIYRVTWFISWSPCFSWGCACEVRAFLQENTHVRLRIFAARIADHAWPLYKEALQMLRDAGAQVSIMTYDEFKHCWDTFVDHQGAPFQPWDGLDEHSQALSRRLRAILQNQGN

SEQ ID NO: 819 - protein, 192 aa, synthetic construct
MEASPASGPRHLMDPHTFYSNFNNKIGRHKTYLCYEVERLDNGTWVKMDQHRGFLHNQPRRHAELLFLDLVPSLQLDPAQIYRVTWFISWSPCFSWGCACEVRAFLQENTHVRLRIFAARIADHWPKLYKEALQMLRDAGAQVSIMTYDEFKHCWDTFVDHQGAPFQPWDGLDEHSQALSRRLRAILQNQGN

SEQ ID NO: 820 - protein, 192 aa, synthetic construct
MEASPASGPRHLMDPHTFYSNFNNKIGRHKTYLCYEVERLDNGTWVKMDQHRGFLHNQPRRHAELLFLDLVPSLQLDPAQIYRVTWFISWSPCFSWGCACEVRAFLQENTHVRLRIFAARIADHWPKAYKEALQMLRDAGAQVSIMTYDEFKHCWDTFVDHQGAPFQPWDGLDEHSQALSRRLRAILQNQGN

SEQ ID NO: 821 - protein, 192 aa, synthetic construct
MEASPASGPRHLMDPHTFYSNFNNKIGRHKTYLCYEVERLDNGTWVKMDQHRGFLHNQPRRHAELLFLDLVPSLQLDPAQIYRVTWFISWSPCFSWGCACEVRAFLQENTHVRLRIFAARIADHWDKAYKEALQMLRDAGAQVSIMTYDEFKHCWDTFVDHQGAPFQPWDGLDEHSQALSRRLRAILQNQGN

SEQ ID NO: 822 - protein, 192 aa, synthetic construct
MEASPASGPRHLMDPHTFYSNFNNKIGRHKTYLCYEVERLDNGTWVKMDQHRGFLHNQPRRHAELLFLDLVPSLQLDPAQIYRVTWFISWSPCFSWGCACEVRAFLQENTHVRLRIFAARIADHEDKAYKEALQMLRDAGAQVSIMTYDEFKHCWDTFVDHQGAPFQPWDGLDEHSQALSRRLRAILQNQGN

SEQ ID NO: 823 - protein, 192 aa, synthetic construct
MEASPASGPRHLMDPHTFYSNFNNKIGRHKTYLCYEVERLDNGTWVKMDQHRGFLHNQPRRHAELLFLDLVPSLQLDPAQIYRVTWFISWSPCFSWGCACEVRAFLQENTHVRLRIFAARIADCEDKAYKEALQMLRDAGAQVSIMTYDEFKHCWDTFVDHQGAPFQPWDGLDEHSQALSRRLRAILQNQGN

SEQ ID NO: 824 - protein, 192 aa, synthetic construct
MEASPASGPRHLMDPHTFYSNFNNKIGRHKTYLCYEVERLDNGTWVKMDQHRGFLHNQPRRHAELLFLDLVPSLQLDPAQIYRVTWFISWSPCFSWGCACEVRAFLQENTHVRLRIFAARIAFCEDKAYKEALQMLRDAGAQVSIMTYDEFKHCWDTFVDHQGAPFQPWDGLDEHSQALSRRLRAILQNQGN

SEQ ID NO: 825 - protein, 192 aa, synthetic construct
MEASPASGPRHLMDPHTFYSNFNNKIGRHKTYLCYEVERLDNGTWVKMDQHRGFLHNQPRRHAELLFLDLVPSLQLDPAQIYRVTWFISWSPCFSWGCACEVRAFLQENTHVRLRIFAARIYFCEDKAYKEALQMLRDAGAQVSIMTYDEFKHCWDTFVDHQGAPFQPWDGLDEHSQALSRRLRAILQNQGN

SEQ ID NO: 826 - protein, 192 aa, synthetic construct
MEASPASGPRHLMDPHTFYSNFNNKIGRHKTYLCYEVERLDNGTWVKMDQHRGFLHNQPRRHAELLFLDLVPSLQLDPAQIYRVTWFISWSPCFSWGCACEVRAFLQENTHVRLRIFAARIADHWPALYKEALQMLRDAGAQVSIMTYDEFKHCWDTFVDHQGAPFQPWDGLDEHSQALSRRLRAILQNQGN

SEQ ID NO: 827 - protein, 192 aa, synthetic construct
MEASPASGPRHLMDPHTFYSNFNNKIGRHKTYLCYEVERLDNGTWVKMDQHRGFLHNQPRRHAELLFLDLVPSLQLDPAQIYRVTWFISWSPCFSWGCACEVRAFLQENTHVRLRIFAARIADHWWPLYKEALQMLRDAGAQVSIMTYDEFKHCWDTFVDHQGAPFQPWDGLDEHSQALSRRLRAILQNQGN

SEQ ID NO: 828 - protein, 192 aa, synthetic construct
MEASPASGPRHLMDPHTFYSNFNNKIGRHKTYLCYEVERLDNGTWVKMDQHRGFLHNQPRRHAELLFLDLVPSLQLDPAQIYRVTWFISWSPCFSWGCACEVRAFLQENTHVRLRIFAARIADHWEPLYKEALQMLRDAGAQVSIMTYDEFKHCWDTFVDHQGAPFQPWDGLDEHSQALSRRLRAILQNQGN

SEQ ID NO: 829 - protein, 192 aa, synthetic construct
MEASPASGPRHLMDPHTFYSNFNNKIAGRHKTYLCYEVERLDNGTWVKMDQHRGFLHNQPRRHAELLFLDLVPSLQLDPAQIYRVTWFISWSPCFSWGCACEVRAFLQENTHVRLRIFAARIADHWPLYKEALQMLRDAGAQVSIMTYDEFKHCWDTFVDHQGAPFQPWDGLDEHSQALSRRLRAILQNQGN

SEQ ID NO: 830 - protein, 192 aa, synthetic construct
MEASPASGPRHLMDPHTFYSNFNNKIGARHKTYLCYEVERLDNGTWVKMDQHRGFLHNQPRRHAELLFLDLVPSLQLDPAQIYRVTWFISWSPCFSWGCACEVRAFLQENTHVRLRIFAARIADHWPLYKEALQMLRDAGAQVSIMTYDEFKHCWDTFVDHQGAPFQPWDGLDEHSQALSRRLRAILQNQGN

SEQ ID NO: 831 - protein, 192 aa, synthetic construct
MEASPASGPRHLMDPHTFYSNFNNKIGRAHKTYLCYEVERLDNGTWVKMDQHRGFLHNQPRRHAELLFLDLVPSLQLDPAQIYRVTWFISWSPCFSWGCACEVRAFLQENTHVRLRIFAARIADHWPLYKEALQMLRDAGAQVSIMTYDEFKHCWDTFVDHQGAPFQPWDGLDEHSQALSRRLRAILQNQGN

SEQ ID NO: 832 - protein, 192 aa, synthetic construct
MEASPASGPRHLMDPHTFYSNFNNKIGRHAKTYLCYEVERLDNGTWVKMDQHRGFLHNQPRRHAELLFLDLVPSLQLDPAQIYRVTWFISWSPCFSWGCACEVRAFLQENTHVRLRIFAARIADHWPLYKEALQMLRDAGAQVSIMTYDEFKHCWDTFVDHQGAPFQPWDGLDEHSQALSRRLRAILQNQGN

SEQ ID NO: 833 - protein, 192 aa, synthetic construct
MEASPASGPRHLMDPHTFYSNFNNKIGRHKATYLCYEVERLDNGTWVKMDQHRGFLHNQPRRHAELLFLDLVPSLQLDPAQIYRVTWFISWSPCFSWGCACEVRAFLQENTHVRLRIFAARIADHWPLYKEALQMLRDAGAQVSIMTYDEFKHCWDTFVDHQGAPFQPWDGLDEHSQALSRRLRAILQNQGN

SEQ ID NO: 834 - protein, 192 aa, synthetic construct
MEASPASGPRHLMDPHTFYSNFNNKIGRHKTAYLCYEVERLDNGTWVKMDQHRGFLHNQPRRHAELLFLDLVPSLQLDPAQIYRVTWFISWSPCFSWGCACEVRAFLQENTHVRLRIFAARIADHWPLYKEALQMLRDAGAQVSIMTYDEFKHCWDTFVDHQGAPFQPWDGLDEHSQALSRRLRAILQNQGN

SEQ ID NO: 835 - protein, 192 aa, synthetic construct
MEASPASGPRHLMDPHTFYSNFNNKIGRHKTYALCYEVERLDNGTWVKMDQHRGFLHNQPRRHAELLFLDLVPSLQLDPAQIYRVTWFISWSPCFSWGCACEVRAFLQENTHVRLRIFAARIADHWPLYKEALQMLRDAGAQVSIMTYDEFKHCWDTFVDHQGAPFQPWDGLDEHSQALSRRLRAILQNQGN

SEQ ID NO: 836 - protein, 192 aa, synthetic construct
MEASPASGPRHLMDPHTFYSNFNNKIGRHKTYLCYEVERLDNGTWVKMDQHRGFLHNQPRRHAELLFLDLVPSLQLDPAQIYRVTWFAISWSPCFSWGCACEVRAFLQENTHVRLRIFAARIADHWPLYKEALQMLRDAGAQVSIMTYDEFKHCWDTFVDHQGAPFQPWDGLDEHSQALSRRLRAILQNQGN

SEQ ID NO: 837 - protein, 192 aa, synthetic construct
MEASPASGPRHLMDPHTFYSNFNNKIGRHKTYLCYEVERLDNGTWVKMDQHRGFLHNQPRRHAELLFLDLVPSLQLDPAQIYRVTWFIASWSPCFSWGCACEVRAFLQENTHVRLRIFAARIADHWPLYKEALQMLRDAGAQVSIMTYDEFKHCWDTFVDHQGAPFQPWDGLDEHSQALSRRLRAILQNQGN

SEQ ID NO: 838 - protein, 192 aa, synthetic construct
MEASPASGPRHLMDPHTFYSNFNNKIGRHKTYLCYEVERLDNGTWVKMDQHRGFLHNQPRRHAELLFLDLVPSLQLDPAQIYRVTWFISAWSPCFSWGCACEVRAFLQENTHVRLRIFAARIADHWPLYKEALQMLRDAGAQVSIMTYDEFKHCWDTFVDHQGAPFQPWDGLDEHSQALSRRLRAILQNQGN

SEQ ID NO: 839 - protein, 192 aa, synthetic construct
MEASPASGPRHLMDPHTFYSNFNNKIGRHKTYLCYEVERLDNGTWVKMDQHRGFLHNQPRRHAELLFLDLVPSLQLDPAQIYRVTWFISWASPCFSWGCACEVRAFLQENTHVRLRIFAARIADHWPLYKEALQMLRDAGAQVSIMTYDEFKHCWDTFVDHQGAPFQPWDGLDEHSQALSRRLRAILQNQGN

SEQ ID NO: 840 - protein, 192 aa, synthetic construct
MEASPASGPRHLMDPHTFYSNFNNKIGRHKTYLCYEVERLDNGTWVKMDQHRGFLHNQPRRHAELLFLDLVPSLQLDPAQIYRVTWFISWSAPCFSWGCACEVRAFLQENTHVRLRIFAARIADHWPLYKEALQMLRDAGAQVSIMTYDEFKHCWDTFVDHQGAPFQPWDGLDEHSQALSRRLRAILQNQGN

SEQ ID NO: 841 - protein, 192 aa, synthetic construct
MEASPASGPRHLMDPHTFYSNFNNKIGRHKTYLCYEVERLDNGTWVKMDQHRGFLHNQPRRHAELLFLDLVPSLQLDPAQIYRVTWFISWSPACFSWGCACEVRAFLQENTHVRLRIFAARIADHWPLYKEALQMLRDAGAQVSIMTYDEFKHCWDTFVDHQGAPFQPWDGLDEHSQALSRRLRAILQNQGN

SEQ ID NO: 842 - protein, 192 aa, synthetic construct
MEASPASGPRHLMDPHTFYSNFNNKIGRHKTYLCYEVERLDNGTWVKMDQHRGFLHNQPRRHAELLFLDLVPSLQLDPAQIYRVTWFISWSPCAFSWGCACEVRAFLQENTHVRLRIFAARIADHWPLYKEALQMLRDAGAQVSIMTYDEFKHCWDTFVDHQGAPFQPWDGLDEHSQALSRRLRAILQNQGN

SEQ ID NO: 843 - protein, 192 aa, synthetic construct
MEASPASGPRHLMDPHTFYSNFNNKIGRHKTYLCYEVERLDNGTWVKMDQHRGFLHNQPRRHAELLFLDLVPSLQLDPAQIYRVTWFISWSPCFASWGCACEVRAFLQENTHVRLRIFAARIADHWPLYKEALQMLRDAGAQVSIMTYDEFKHCWDTFVDHQGAPFQPWDGLDEHSQALSRRLRAILQNQGN

SEQ ID NO: 844 - protein, 192 aa, synthetic construct
MEASPASGPRHLMDPHTFYSNFNNKIGRHKTYLCYEVERLDNGTWVKMDQHRGFLHNQPRRHAELLFLDLVPSLQLDPAQIYRVTWFISWSPCFSAWGCACEVRAFLQENTHVRLRIFAARIADHWPLYKEALQMLRDAGAQVSIMTYDEFKHCWDTFVDHQGAPFQPWDGLDEHSQALSRRLRAILQNQGN

SEQ ID NO: 845 - protein, 192 aa, synthetic construct
MEASPASGPRHLMDPHTFYSNFNNKIGRHKTYLCYEVERLDNGTWVKMDQHRGFLHNQPRRHAELLFLDLVPSLQLDPAQIYRVTWFISWSPCFSWAGCACEVRAFLQENTHVRLRIFAARIADHWPLYKEALQMLRDAGAQVSIMTYDEFKHCWDTFVDHQGAPFQPWDGLDEHSQALSRRLRAILQNQGN

SEQ ID NO: 846 - protein, 192 aa, synthetic construct
MEASPASGPRHLMDPHTFYSNFNNKIGRHKTYLCYEVERLDNGTWVKMDQHRGFLHNQPRRHAELLFLDLVPSLQLDPAQIYRVTWFISWSPCFSWGCACEVRAFLQENTHVRLRIFAAARIADHWPLYKEALQMLRDAGAQVSIMTYDEFKHCWDTFVDHQGAPFQPWDGLDEHSQALSRRLRAILQNQGN

SEQ ID NO: 847 - protein, 192 aa, synthetic construct
MEASPASGPRHLMDPHTFYSNFNNKIGRHKTYLCYEVERLDNGTWVKMDQHRGFLHNQPRRHAELLFLDLVPSLQLDPAQIYRVTWFISWSPCFSWGCACEVRAFLQENTHVRLRIFAARAIADHWPLYKEALQMLRDAGAQVSIMTYDEFKHCWDTFVDHQGAPFQPWDGLDEHSQALSRRLRAILQNQGN

SEQ ID NO: 848 - protein, 192 aa, synthetic construct
MEASPASGPRHLMDPHTFYSNFNNKIGRHKTYLCYEVERLDNGTWVKMDQHRGFLHNQPRRHAELLFLDLVPSLQLDPAQIYRVTWFISWSPCFSWGCACEVRAFLQENTHVRLRIFAARIADHWAPLYKEALQMLRDAGAQVSIMTYDEFKHCWDTFVDHQGAPFQPWDGLDEHSQALSRRLRAILQNQGN

SEQ ID NO: 849 - protein, 192 aa, synthetic construct
MEASPASGPRHLMDPHTFYSNFNNKIGRHKTYLCYEVERLDNGTWVKMDQHRGFLHNQPRRHAELLFLDLVPSLQLDPAQIYRVTWFISWSPCFSWGCACEVRAFLQENTHVRLRIFAARIADHWPLAYKEALQMLRDAGAQVSIMTYDEFKHCWDTFVDHQGAPFQPWDGLDEHSQALSRRLRAILQNQGN

SEQ ID NO: 850 - protein, 192 aa, synthetic construct
MEASPASGPRHLMDPHTFYSNFNNKIGRHKTYLCYEVERLDNGTWVKMDQHRGFLHNQPRRHAELLFLDLVPSLQLDPAQIYRVTWFISWSPCFSWGCACEVRAFLQENTHVRLRIFAARIADHWPLYAKEALQMLRDAGAQVSIMTYDEFKHCWDTFVDHQGAPFQPWDGLDEHSQALSRRLRAILQNQGN

SEQ ID NO: 851 - protein, 192 aa, synthetic construct
MEASPASGPRHLMDPHTFYSNFNNKIGRHKTYLCYEVERLDNGTWVKMDQHRGFLHNQPRRHAELLFLDLVPSLQLDPAQIYRVTWFISWSPCFSWGCACEVRAFLQENTHVRLRIFAARIADHWPLYKAEALQMLRDAGAQVSIMTYDEFKHCWDTFVDHQGAPFQPWDGLDEHSQALSRRLRAILQNQGN

SEQ ID NO: 852 - protein, 192 aa, synthetic construct
MEASPASGPRHLMDPHTFYSNFNNKIGRHKTYLCYEVERLDNGTWVKMDQHRGFLHNQPRRHAELLFLDLVPSLQLDPAQIYRVTWFISWSPCFSWGCACEVRAFLQENTHVRLRIFAARIADHWPLYKEAALQMLRDAGAQVSIMTYDEFKHCWDTFVDHQGAPFQPWDGLDEHSQALSRRLRAILQNQGN

SEQ ID NO: 853 - protein, 191 aa, synthetic construct
MEASPASGPRHLMDPHTFYSNFNNKIGRHKTYLCYEVERLDNGTWVKMDQHRGFLHNQPRRHAELLFLDLVPSLQLDPAQIYRVTWFISWSPCFSCGCACEVRAFLQENTHVRLRIFAARIADHWPLYKEALQMLRDAGAQVSIMTYDEFKHCWDTFVDHQGAPFQPWDGLDEHSQALSRRLRAILQNQGN

SEQ ID NO: 854 - protein, 191 aa, synthetic construct
MEASPASGPRHLMDPHTFYSNFNNKIGRHKTYLCYEVERLDNGTWVKMDQHRGFLHNQPRRHAELLFLDLVPSLQLDPAQIYRVTWFISWSPAFSCGCACEVRAFLQENTHVRLRIFAARIADHWPLYKEALQMLRDAGAQVSIMTYDEFKHCWDTFVDHQGAPFQPWDGLDEHSQALSRRLRAILQNQGN

SEQ ID NO: 855 - protein, 191 aa, synthetic construct
MEASPASGPRHLMDPHTFYSNFNNKIGRHKTYLCYEVERLDNGTWVKMDQHRGFLHNQPRRHAELLFLDLVPSLQLDPAQIYRVTWFISWSPGFSCGCACEVRAFLQENTHVRLRIFAARIADHWPLYKEALQMLRDAGAQVSIMTYDEFKHCWDTFVDHQGAPFQPWDGLDEHSQALSRRLRAILQNQGN

SEQ ID NO: 856 - protein, 191 aa, synthetic construct
MEASPASGPRHLMDPHTFYSNFNNKIGRHKTYLCYEVERLDNGTWVKMDQHRGFLHNQPRRHAELLFLDLVPSLQLDPAQIYRVTWFISWSPCFSCGAACEVRAFLQENTHVRLRIFAARIADHWPLYKEALQMLRDAGAQVSIMTYDEFKHCWDTFVDHQGAPFQPWDGLDEHSQALSRRLRAILQNQGN

SEQ ID NO: 857 - protein, 191 aa, synthetic construct
MEASPASGPRHLMDPHTFYSNFNNKIGRHKTYLCYEVERLDNGTWVKMDQHRGFLHNQPRRHAELLFLDLVPSLQLDPAQIYRVTWFISWSPLFSCGCACEVRAFLQENTHVRLRIFAARIADHWPLYKEALQMLRDAGAQVSIMTYDEFKHCWDTFVDHQGAPFQPWDGLDEHSQALSRRLRAILQNQGN

SEQ ID NO: 858 - protein, 191 aa, synthetic construct
MEASPASGPRHLMDPHTFYSNFNNKIGRHKTYLCYEVERLDNGTWVKMDQHRGFLHNQPRRHAELLFLDLVPSLQLDPAQIYRVTWFISWSPSFSCGCACEVRAFLQENTHVRLRIFAARIADHWPLYKEALQMLRDAGAQVSIMTYDEFKHCWDTFVDHQGAPFQPWDGLDEHSQALSRRLRAILQNQGN

SEQ ID NO: 859 - protein, 189 aa, synthetic construct
MEASPASGPRHLMDPHTFYSNFNNKIGRHKTYLCYEVERLDNGTWVKMDQHRGFLHNQPRRHAELLFLDLVPSLQLDPAQIYRVTWFISWSPCFSCACEVRAFLQENTHVRLRIFCARIADHWPLYKEALQMLRDAGAQVSIMTYDEFKHCWDTFVDHQGAPFQPWDGLDEHSQALSRRLRAILQNQGN

SEQ ID NO: 860 - protein, 189 aa, synthetic construct
MEASPASGPRHLMDPHTFYSNFNNKIGRHKTYLCYEVERLDNGTWVKMDQHRGFLHNQPGRHAELLFLDLVPSLQLDPAQIYRVTWFISWSPCFSCACEVRAFLQENTHVRLRIFCARIADHWPLYKEALQMLRDAGAQVSIMTYDEFKHCWDTFVDHQGAPFQPWDGLDEHSQALSRRLRAILQNQGN

SEQ ID NO: 861 - protein, 191 aa, synthetic construct
MEASPASGPRHLMDPHTFYSNFNNKIGRHKTYLCYEVERLDNGTWVKMDQHRGFLHNQPRRHAELLFLDLVPSLQLDPAQIYRVTWFISWSPCFAWGCACEVRAFLQENTHVRLRIFAARIADHWPLYKEALQMLRDAGAQVSIMTYDEFKHCWDTFVDHQGAPFQPWDGLDEHSQALSRRLRAILQNQGN

SEQ ID NO: 862-863 - skipped (2 entries)

SEQ ID NO: 864 - protein, 191 aa, synthetic construct
MEASPASGPRHLMDPHTFYSNFNNKIGRHKTYLCYEVERLDNGTWVKMDQHRGFLHNQPRRHAELLFLDLVPSLQLDPAQIYRVTWFISWSPCFEWGCACEVRAFLQENTHVRLRIFAARIADHWPLYKEALQMLRDAGAQVSIMTYDEFKHCWDTFVDHQGAPFQPWDGLDEHSQALSRRLRAILQNQGN

SEQ ID NO: 865 - skipped

SEQ ID NO: 866 - protein, 191 aa, synthetic construct
MEASPASGPRHLMDPHTFYSNFNNKIGRHKTYLCYEVERLDNGTWVKMDQHRGFLHNQPRRHAELLFLDLVPSLQLDPAQIYRVTWFISWSPCFGWGCACEVRAFLQENTHVRLRIFAARIADHWPLYKEALQMLRDAGAQVSIMTYDEFKHCWDTFVDHQGAPFQPWDGLDEHSQALSRRLRAILQNQGN

SEQ ID NO: 867-871 - skipped (5 entries)

SEQ ID NO: 872 - protein, 191 aa, synthetic construct
MEASPASGPRHLMDPHTFYSNFNNKIGRHKTYLCYEVERLDNGTWVKMDQHRGFLHNQPRRHAELLFLDLVPSLQLDPAQIYRVTWFISWSPCFNWGCACEVRAFLQENTHVRLRIFAARIADHWPLYKEALQMLRDAGAQVSIMTYDEFKHCWDTFVDHQGAPFQPWDGLDEHSQALSRRLRAILQNQGN

SEQ ID NO: 873 - protein, 191 aa, synthetic construct
MEASPASGPRHLMDPHTFYSNFNNKIGRHKTYLCYEVERLDNGTWVKMDQHRGFLHNQPRRHAELLFLDLVPSLQLDPAQIYRVTWFISWSPCFPWGCACEVRAFLQENTHVRLRIFAARIADHWPLYKEALQMLRDAGAQVSIMTYDEFKHCWDTFVDHQGAPFQPWDGLDEHSQALSRRLRAILQNQGN

SEQ ID NO: 874-876 - skipped (3 entries)

SEQ ID NO: 877 - protein, 191 aa, synthetic construct
MEASPASGPRHLMDPHTFYSNFNNKIGRHKTYLCYEVERLDNGTWVKMDQHRGFLHNQPRRHAELLFLDLVPSLQLDPAQIYRVTWFISWSPCFVWGCACEVRAFLQENTHVRLRIFAARIADHWPLYKEALQMLRDAGAQVSIMTYDEFKHCWDTFVDHQGAPFQPWDGLDEHSQALSRRLRAILQNQGN

SEQ ID NO: 878-879 - skipped (2 entries)

SEQ ID NO: 880 - protein, 190 aa, synthetic construct
MEASPASGPRHLMDPHTFYSNFNNKIGRHKTYLCYEVERLDNGTWVKMDQHRGFLHNQPRRHAELLFLDLVPSLQLDPAQIYRVTWFISWSPCFWGCACEVRAFLQENTHVRLRIFAARIADHWPLYKEALQMLRDAGAQVSIMTYDEFKHCWDTFVDHQGAPFQPWDGLDEHSQALSRRLRAILQNQGN

SEQ ID NO: 881 - protein, 189 aa, synthetic construct
MEASPASGPRHLMDPHTFYSNFNNKIGRHKTYLCYEVERLDNGTWVKMDQHRGFLHNQPRRHAELLFLDLVPSLQLDPAQIYRVTWFISWSPCFACACEVRAFLQENTHVRLRIFAARIADHWPLYKEALQMLRDAGAQVSIMTYDEFKHCWDTFVDHQGAPFQPWDGLDEHSQALSRRLRAILQNQGN

SEQ ID NO: 882 - protein, 189 aa, synthetic construct
MEASPASGPRHLMDPHTFYSNFNNKIGRHKTYLCYEVERLDNGTWVKMDQHRGFLHNQPRRHAELLFLDLVPSLQLDPAQIYRVTWFISWSPCFCCACEVRAFLQENTHVRLRIFAARIADHWPLYKEALQMLRDAGAQVSIMTYDEFKHCWDTFVDHQGAPFQPWDGLDEHSQALSRRLRAILQNQGN

SEQ ID NO: 883 - protein, 189 aa, synthetic construct
MEASPASGPRHLMDPHTFYSNFNNKIGRHKTYLCYEVERLDNGTWVKMDQHRGFLHNQPRRHAELLFLDLVPSLQLDPAQIYRVTWFISWSPCFDCACEVRAFLQENTHVRLRIFAARIADHWPLYKEALQMLRDAGAQVSIMTYDEFKHCWDTFVDHQGAPFQPWDGLDEHSQALSRRLRAILQNQGN

SEQ ID NO: 884 - protein, 189 aa, synthetic construct
MEASPASGPRHLMDPHTFYSNFNNKIGRHKTYLCYEVERLDNGTWVKMDQHRGFLHNQPRRHAELLFLDLVPSLQLDPAQIYRVTWFISWSPCFECACEVRAFLQENTHVRLRIFAARIADHWPLYKEALQMLRDAGAQVSIMTYDEFKHCWDTFVDHQGAPFQPWDGLDEHSQALSRRLRAILQNQGN

SEQ ID NO: 885 - protein, 189 aa, synthetic construct
MEASPASGPRHLMDPHTFYSNFNNKIGRHKTYLCYEVERLDNGTWVKMDQHRGFLHNQPRRHAELLFLDLVPSLQLDPAQIYRVTWFISWSPCFFCACEVRAFLQENTHVRLRIFAARIADHWPLYKEALQMLRDAGAQVSIMTYDEFKHCWDTFVDHQGAPFQPWDGLDEHSQALSRRLRAILQNQGN

SEQ ID NO: 886 - protein, 189 aa, synthetic construct
MEASPASGPRHLMDPHTFYSNFNNKIGRHKTYLCYEVERLDNGTWVKMDQHRGFLHNQPRRHAELLFLDLVPSLQLDPAQIYRVTWFISWSPCFGCACEVRAFLQENTHVRLRIFAARIADHWPLYKEALQMLRDAGAQVSIMTYDEFKHCWDTFVDHQGAPFQPWDGLDEHSQALSRRLRAILQNQGN

SEQ ID NO: 887 - protein, 189 aa, synthetic construct
MEASPASGPRHLMDPHTFYSNFNNKIGRHKTYLCYEVERLDNGTWVKMDQHRGFLHNQPRRHAELLFLDLVPSLQLDPAQIYRVTWFISWSPCFHCACEVRAFLQENTHVRLRIFAARIADHWPLYKEALQMLRDAGAQVSIMTYDEFKHCWDTFVDHQGAPFQPWDGLDEHSQALSRRLRAILQNQGN

SEQ ID NO: 888 - protein, 189 aa, synthetic construct
MEASPASGPRHLMDPHTFYSNFNNKIGRHKTYLCYEVERLDNGTWVKMDQHRGFLHNQPRRHAELLFLDLVPSLQLDPAQIYRVTWFISWSPCFICACEVRAFLQENTHVRLRIFAARIADHWPLYKEALQMLRDAGAQVSIMTYDEFKHCWDTFVDHQGAPFQPWDGLDEHSQALSRRLRAILQNQGN

SEQ ID NO: 889 - protein, 189 aa, synthetic construct
MEASPASGPRHLMDPHTFYSNFNNKIGRHKTYLCYEVERLDNGTWVKMDQHRGFLHNQPRRHAELLFLDLVPSLQLDPAQIYRVTWFISWSPCFKCACEVRAFLQENTHVRLRIFAARIADHWPLYKEALQMLRDAGAQVSIMTYDEFKHCWDTFVDHQGAPFQPWDGLDEHSQALSRRLRAILQNQGN

SEQ ID NO: 890 - protein, 189 aa, synthetic construct
MEASPASGPRHLMDPHTFYSNFNNKIGRHKTYLCYEVERLDNGTWVKMDQHRGFLHNQPRRHAELLFLDLVPSLQLDPAQIYRVTWFISWSPCFLCACEVRAFLQENTHVRLRIFAARIADHWPLYKEALQMLRDAGAQVSIMTYDEFKHCWDTFVDHQGAPFQPWDGLDEHSQALSRRLRAILQNQGN

SEQ ID NO: 891 - protein, 189 aa, synthetic construct
MEASPASGPRHLMDPHTFYSNFNNKIGRHKTYLCYEVERLDNGTWVKMDQHRGFLHNQPRRHAELLFLDLVPSLQLDPAQIYRVTWFISWSPCFMCACEVRAFLQENTHVRLRIFAARIADHWPLYKEALQMLRDAGAQVSIMTYDEFKHCWDTFVDHQGAPFQPWDGLDEHSQALSRRLRAILQNQGN

SEQ ID NO: 892 - protein, 189 aa, synthetic construct
MEASPASGPRHLMDPHTFYSNFNNKIGRHKTYLCYEVERLDNGTWVKMDQHRGFLHNQPRRHAELLFLDLVPSLQLDPAQIYRVTWFISWSPCFNCACEVRAFLQENTHVRLRIFAARIADHWPLYKEALQMLRDAGAQVSIMTYDEFKHCWDTFVDHQGAPFQPWDGLDEHSQALSRRLRAILQNQGN

SEQ ID NO: 893 - protein, 189 aa, synthetic construct
MEASPASGPRHLMDPHTFYSNFNNKIGRHKTYLCYEVERLDNGTWVKMDQHRGFLHNQPRRHAELLFLDLVPSLQLDPAQIYRVTWFISWSPCFPCACEVRAFLQENTHVRLRIFAARIADHWPLYKEALQMLRDAGAQVSIMTYDEFKHCWDTFVDHQGAPFQPWDGLDEHSQALSRRLRAILQNQGN

SEQ ID NO: 894 - protein, 189 aa, synthetic construct
MEASPASGPRHLMDPHTFYSNFNNKIGRHKTYLCYEVERLDNGTWVKMDQHRGFLHNQPRRHAELLFLDLVPSLQLDPAQIYRVTWFISWSPCFQCACEVRAFLQENTHVRLRIFAARIADHWPLYKEALQMLRDAGAQVSIMTYDEFKHCWDTFVDHQGAPFQPWDGLDEHSQALSRRLRAILQNQGN

SEQ ID NO: 895 - protein, 189 aa, synthetic construct
MEASPASGPRHLMDPHTFYSNFNNKIGRHKTYLCYEVERLDNGTWVKMDQHRGFLHNQPRRHAELLFLDLVPSLQLDPAQIYRVTWFISWSPCFRCACEVRAFLQENTHVRLRIFAARIADHWPLYKEALQMLRDAGAQVSIMTYDEFKHCWDTFVDHQGAPFQPWDGLDEHSQALSRRLRAILQNQGN

SEQ ID NO: 896 - protein, 189 aa, synthetic construct
MEASPASGPRHLMDPHTFYSNFNNKIGRHKTYLCYEVERLDNGTWVKMDQHRGFLHNQPRRHAELLFLDLVPSLQLDPAQIYRVTWFISWSPCFTCACEVRAFLQENTHVRLRIFAARIADHWPLYKEALQMLRDAGAQVSIMTYDEFKHCWDTFVDHQGAPFQPWDGLDEHSQALSRRLRAILQNQGN

SEQ ID NO: 897 - protein, 189 aa, synthetic construct
MEASPASGPRHLMDPHTFYSNFNNKIGRHKTYLCYEVERLDNGTWVKMDQHRGFLHNQPRRHAELLFLDLVPSLQLDPAQIYRVTWFISWSPCFVCACEVRAFLQENTHVRLRIFAARIADHWPLYKEALQMLRDAGAQVSIMTYDEFKHCWDTFVDHQGAPFQPWDGLDEHSQALSRRLRAILQNQGN

SEQ ID NO: 898 - protein, 189 aa, synthetic construct
MEASPASGPRHLMDPHTFYSNFNNKIGRHKTYLCYEVERLDNGTWVKMDQHRGFLHNQPRRHAELLFLDLVPSLQLDPAQIYRVTWFISWSPCFWCACEVRAFLQENTHVRLRIFAARIADHWPLYKEALQMLRDAGAQVSIMTYDEFKHCWDTFVDHQGAPFQPWDGLDEHSQALSRRLRAILQNQGN

SEQ ID NO: 899 - protein, 189 aa, synthetic construct
MEASPASGPRHLMDPHTFYSNFNNKIGRHKTYLCYEVERLDNGTWVKMDQHRGFLHNQPRRHAELLFLDLVPSLQLDPAQIYRVTWFISWSPCFYCACEVRAFLQENTHVRLRIFAARIADHWPLYKEALQMLRDAGAQVSIMTYDEFKHCWDTFVDHQGAPFQPWDGLDEHSQALSRRLRAILQNQGN

SEQ ID NO: 900 - protein, 188 aa, synthetic construct
MEASPASGPRHLMDPHTFYSNFNNKIGRHKTYLCYEVERLDNGTWVKMDQHRGFLHNQPRRHAELLFLDLVPSLQLDPAQIYRVTWFISWSPCFCACEVRAFLQENTHVRLRIFAARIADHWPLYKEALQMLRDAGAQVSIMTYDEFKHCWDTFVDHQGAPFQPWDGLDEHSQALSRRLRAILQNQGN

SEQ ID NO: 901 - skipped

SEQ ID NO: 902 - protein, 191 aa, synthetic construct
MEASPASGPRHLMDPHTFYSNFNNKIGRHKTYLCYEVERLDNGTWVKMDQHRGFLHNQPRRHAELLFLDLVPSLQLDPAQIYRVTWFISWSPCFSWGCACEVRAFLQENTHVRLRIFAARIADHWPLYKCALQMLRDAGAQVSIMTYDEFKHCWDTFVDHQGAPFQPWDGLDEHSQALSRRLRAILQNQGN

SEQ ID NO: 903 - protein, 191 aa, synthetic construct
MEASPASGPRHLMDPHTFYSNFNNKIGRHKTYLCYEVERLDNGTWVKMDQHRGFLHNQPRRHAELLFLDLVPSLQLDPAQIYRVTWFISWSPCFSWGCACEVRAFLQENTHVRLRIFAARIADHWPLYKDALQMLRDAGAQVSIMTYDEFKHCWDTFVDHQGAPFQPWDGLDEHSQALSRRLRAILQNQGN

SEQ ID NO: 904 - skipped

SEQ ID NO: 905 - protein, 191 aa, synthetic construct
MEASPASGPRHLMDPHTFYSNFNNKIGRHKTYLCYEVERLDNGTWVKMDQHRGFLHNQPRRHAELLFLDLVPSLQLDPAQIYRVTWFISWSPCFSWGCACEVRAFLQENTHVRLRIFAARIADHWPLYKGALQMLRDAGAQVSIMTYDEFKHCWDTFVDHQGAPFQPWDGLDEHSQALSRRLRAILQNQGN

SEQ ID NO: 906 - protein, 191 aa, synthetic construct
MEASPASGPRHLMDPHTFYSNFNNKIGRHKTYLCYEVERLDNGTWVKMDQHRGFLHNQPRRHAELLFLDLVPSLQLDPAQIYRVTWFISWSPCFSWGCACEVRAFLQENTHVRLRIFAARIADHWPLYKHALQMLRDAGAQVSIMTYDEFKHCWDTFVDHQGAPFQPWDGLDEHSQALSRRLRAILQNQGN

SEQ ID NO: 907 - skipped

SEQ ID NO: 908 - protein, 191 aa, synthetic construct
MEASPASGPRHLMDPHTFYSNFNNKIGRHKTYLCYEVERLDNGTWVKMDQHRGFLHNQPRRHAELLFLDLVPSLQLDPAQIYRVTWFISWSPCFSWGCACEVRAFLQENTHVRLRIFAARIADHWPLYKKALQMLRDAGAQVSIMTYDEFKHCWDTFVDHQGAPFQPWDGLDEHSQALSRRLRAILQNQGN

SEQ ID NO: 909-910 - skipped (2 entries)

SEQ ID NO: 911 - protein, 191 aa, synthetic construct
MEASPASGPRHLMDPHTFYSNFNNKIGRHKTYLCYEVERLDNGTWVKMDQHRGFLHNQPRRHAELLFLDLVPSLQLDPAQIYRVTWFISWSPCFSWGCACEVRAFLQENTHVRLRIFAARIADHWPLYKNALQMLRDAGAQVSIMTYDEFKHCWDTFVDHQGAPFQPWDGLDEHSQALSRRLRAILQNQGN

SEQ ID NO: 912-914 - skipped (3 entries)

SEQ ID NO: 915 - protein, 191 aa, synthetic construct
MEASPASGPRHLMDPHTFYSNFNNKIGRHKTYLCYEVERLDNGTWVKMDQHRGFLHNQPRRHAELLFLDLVPSLQLDPAQIYRVTWFISWSPCFSWGCACEVRAFLQENTHVRLRIFAARIADHWPLYKSALQMLRDAGAQVSIMTYDEFKHCWDTFVDHQGAPFQPWDGLDEHSQALSRRLRAILQNQGN

SEQ ID NO: 916 - protein, 191 aa, synthetic construct
MEASPASGPRHLMDPHTFYSNFNNKIGRHKTYLCYEVERLDNGTWVKMDQHRGFLHNQPRRHAELLFLDLVPSLQLDPAQIYRVTWFISWSPCFSWGCACEVRAFLQENTHVRLRIFAARIADHWPLYKTALQMLRDAGAQVSIMTYDEFKHCWDTFVDHQGAPFQPWDGLDEHSQALSRRLRAILQNQGN

SEQ ID NO: 917 - protein, 191 aa, synthetic construct
MEASPASGPRHLMDPHTFYSNFNNKIGRHKTYLCYEVERLDNGTWVKMDQHRGFLHNQPRRHAELLFLDLVPSLQLDPAQIYRVTWFISWSPCFSWGCACEVRAFLQENTHVRLRIFAARIADHWPLYKVALQMLRDAGAQVSIMTYDEFKHCWDTFVDHQGAPFQPWDGLDEHSQALSRRLRAILQNQGN

SEQ ID NO: 918 - skipped

SEQ ID NO: 919 - protein, 191 aa, synthetic construct
MEASPASGPRHLMDPHTFYSNFNNKIGRHKTYLCYEVERLDNGTWVKMDQHRGFLHNQPRRHAELLFLDLVPSLQLDPAQIYRVTWFISWSPCFSWGCACEVRAFLQENTHVRLRIFAARIADHWPLYKYALQMLRDAGAQVSIMTYDEFKHCWDTFVDHQGAPFQPWDGLDEHSQALSRRLRAILQNQGN

SEQ ID NO: 920 - protein, 190 aa, synthetic construct
MEASPASGPRHLMDPHTFYSNFNNKIGRHKTYLCYEVERLDNGTWVKMDQHRGFLHNQPRRHAELLFLDLVPSLQLDPAQIYRVTWFISWSPCFSWGCACEVRAFLQENTHVRLRIFAARIADHWPLYKALQMLRDAGAQVSIMTYDEFKHCWDTFVDHQGAPFQPWDGLDEHSQALSRRLRAILQNQGN

SEQ ID NO: 921 - protein, 191 aa, synthetic construct
MEASPASGPRHLMDPHTFYSNFNNKIGRHKTYLCYEVERLDNGTWVKMDQHRGFLHNQPRRHAELLFLDLVPSLQLDPAQIYRVTWFISWSPCFSWACACEVRAFLQENTHVRLRIFAARIADHWPLYKEALQMLRDAGAQVSIMTYDEFKHCWDTFVDHQGAPFQPWDGLDEHSQALSRRLRAILQNQGN

SEQ ID NO: 922 - protein, 191 aa, synthetic construct
MEASPASGPRHLMDPHTFYSNFNNKIGRHKTYLCYEVERLDNGTWVKMDQHRGFLHNQPRRHAELLFLDLVPSLQLDPAQIYRVTWFISWSPCFSWCCACEVRAFLQENTHVRLRIFAARIADHWPLYKEALQMLRDAGAQVSIMTYDEFKHCWDTFVDHQGAPFQPWDGLDEHSQALSRRLRAILQNQGN

SEQ ID NO: 923 - protein, 191 aa, synthetic construct
MEASPASGPRHLMDPHTFYSNFNNKIGRHKTYLCYEVERLDNGTWVKMDQHRGFLHNQPRRHAELLFLDLVPSLQLDPAQIYRVTWFISWSPCFSWDCACEVRAFLQENTHVRLRIFAARIADHWPLYKEALQMLRDAGAQVSIMTYDEFKHCWDTFVDHQGAPFQPWDGLDEHSQALSRRLRAILQNQGN

SEQ ID NO: 924 - protein, 191 aa, synthetic construct
MEASPASGPRHLMDPHTFYSNFNNKIGRHKTYLCYEVERLDNGTWVKMDQHRGFLHNQPRRHAELLFLDLVPSLQLDPAQIYRVTWFISWSPCFSWECACEVRAFLQENTHVRLRIFAARIADHWPLYKEALQMLRDAGAQVSIMTYDEFKHCWDTFVDHQGAPFQPWDGLDEHSQALSRRLRAILQNQGN

SEQ ID NO: 925 - protein, 191 aa, synthetic construct
MEASPASGPRHLMDPHTFYSNFNNKIGRHKTYLCYEVERLDNGTWVKMDQHRGFLHNQPRRHAELLFLDLVPSLQLDPAQIYRVTWFISWSPCFSWFCACEVRAFLQENTHVRLRIFAARIADHWPLYKEALQMLRDAGAQVSIMTYDEFKHCWDTFVDHQGAPFQPWDGLDEHSQALSRRLRAILQNQGN

SEQ ID NO: 926 - protein, 191 aa, synthetic construct
MEASPASGPRHLMDPHTFYSNFNNKIGRHKTYLCYEVERLDNGTWVKMDQHRGFLHNQPRRHAELLFLDLVPSLQLDPAQIYRVTWFISWSPCFSWHCACEVRAFLQENTHVRLRIFAARIADHWPLYKEALQMLRDAGAQVSIMTYDEFKHCWDTFVDHQGAPFQPWDGLDEHSQALSRRLRAILQNQGN

SEQ ID NO: 927 - protein, 191 aa, synthetic construct
MEASPASGPRHLMDPHTFYSNFNNKIGRHKTYLCYEVERLDNGTWVKMDQHRGFLHNQPRRHAELLFLDLVPSLQLDPAQIYRVTWFISWSPCFSWICACEVRAFLQENTHVRLRIFAARIADHWPLYKEALQMLRDAGAQVSIMTYDEFKHCWDTFVDHQGAPFQPWDGLDEHSQALSRRLRAILQNQGN

SEQ ID NO: 928 - skipped

SEQ ID NO: 929 - protein, 191 aa, synthetic construct
MEASPASGPRHLMDPHTFYSNFNNKIGRHKTYLCYEVERLDNGTWVKMDQHRGFLHNQPRRHAELLFLDLVPSLQLDPAQIYRVTWFISWSPCFSWLCACEVRAFLQENTHVRLRIFAARIADHWPLYKEALQMLRDAGAQVSIMTYDEFKHCWDTFVDHQGAPFQPWDGLDEHSQALSRRLRAILQNQGN

SEQ ID NO: 930 - protein, 191 aa, synthetic construct
MEASPASGPRHLMDPHTFYSNFNNKIGRHKTYLCYEVERLDNGTWVKMDQHRGFLHNQPRRHAELLFLDLVPSLQLDPAQIYRVTWFISWSPCFSWMCACEVRAFLQENTHVRLRIFAARIADHWPLYKEALQMLRDAGAQVSIMTYDEFKHCWDTFVDHQGAPFQPWDGLDEHSQALSRRLRAILQNQGN

SEQ ID NO: 931 - skipped

SEQ ID NO: 932 - protein, 191 aa, synthetic construct
MEASPASGPRHLMDPHTFYSNFNNKIGRHKTYLCYEVERLDNGTWVKMDQHRGFLHNQPRRHAELLFLDLVPSLQLDPAQIYRVTWFISWSPCFSWPCACEVRAFLQENTHVRLRIFAARIADHWPLYKEALQMLRDAGAQVSIMTYDEFKHCWDTFVDHQGAPFQPWDGLDEHSQALSRRLRAILQNQGN

SEQ ID NO: 933 - protein, 191 aa, synthetic construct
MEASPASGPRHLMDPHTFYSNFNNKIGRHKTYLCYEVERLDNGTWVKMDQHRGFLHNQPRRHAELLFLDLVPSLQLDPAQIYRVTWFISWSPCFSWQCACEVRAFLQENTHVRLRIFAARIADHWPLYKEALQMLRDAGAQVSIMTYDEFKHCWDTFVDHQGAPFQPWDGLDEHSQALSRRLRAILQNQGN

SEQ ID NO: 934 - protein, 191 aa, synthetic construct
MEASPASGPRHLMDPHTFYSNFNNKIGRHKTYLCYEVERLDNGTWVKMDQHRGFLHNQPRRHAELLFLDLVPSLQLDPAQIYRVTWFISWSPCFSWRCACEVRAFLQENTHVRLRIFAARIADHWPLYKEALQMLRDAGAQVSIMTYDEFKHCWDTFVDHQGAPFQPWDGLDEHSQALSRRLRAILQNQGN

SEQ ID NO: 935 - protein, 191 aa, synthetic construct
MEASPASGPRHLMDPHTFYSNFNNKIGRHKTYLCYEVERLDNGTWVKMDQHRGFLHNQPRRHAELLFLDLVPSLQLDPAQIYRVTWFISWSPCFSWSCACEVRAFLQENTHVRLRIFAARIADHWPLYKEALQMLRDAGAQVSIMTYDEFKHCWDTFVDHQGAPFQPWDGLDEHSQALSRRLRAILQNQGN

SEQ ID NO: 936 - protein, 191 aa, synthetic construct
MEASPASGPRHLMDPHTFYSNFNNKIGRHKTYLCYEVERLDNGTWVKMDQHRGFLHNQPRRHAELLFLDLVPSLQLDPAQIYRVTWFISWSPCFSWTCACEVRAFLQENTHVRLRIFAARIADHWPLYKEALQMLRDAGAQVSIMTYDEFKHCWDTFVDHQGAPFQPWDGLDEHSQALSRRLRAILQNQGN

SEQ ID NO: 937 - protein, 191 aa, synthetic construct
MEASPASGPRHLMDPHTFYSNFNNKIGRHKTYLCYEVERLDNGTWVKMDQHRGFLHNQPRRHAELLFLDLVPSLQLDPAQIYRVTWFISWSPCFSWVCACEVRAFLQENTHVRLRIFAARIADHWPLYKEALQMLRDAGAQVSIMTYDEFKHCWDTFVDHQGAPFQPWDGLDEHSQALSRRLRAILQNQGN

SEQ ID NO: 938-939 - skipped (2 entries)

SEQ ID NO: 940 - protein, 190 aa, synthetic construct
MEASPASGPRHLMDPHTFYSNFNNKIGRHKTYLCYEVERLDNGTWVKMDQHRGFLHNQPRRHAELLFLDLVPSLQLDPAQIYRVTWFISWSPCFSWCACEVRAFLQENTHVRLRIFAARIADHWPLYKEALQMLRDAGAQVSIMTYDEFKHCWDTFVDHQGAPFQPWDGLDEHSQALSRRLRAILQNQGN

SEQ ID NO: 941 - protein, 189 aa, synthetic construct
MEASPASGPRHLMDPHTFYSNFNNGRHKTYLCYEVERLDNGTWVKMDQHRGFLHNQPRRHAELLFLDLVPSLQLDPAQIYRVTWFISWSPCFSWGCACEVRAFLQENTHVRLRIFAARIADHWPLYKEALQMLRDAGAQVSIMTYDEFKHCWDTFVDHQGAPFQPWDGLDEHSQALSRRLRAILQNQGN

SEQ ID NO: 942 - skipped

SEQ ID NO: 943 - protein, 189 aa, synthetic construct
MEASPASGPRHLMDPHTFYSNFNNKIHKTYLCYEVERLDNGTWVKMDQHRGFLHNQPRRHAELLFLDLVPSLQLDPAQIYRVTWFISWSPCFSWGCACEVRAFLQENTHVRLRIFAARIADHWPLYKEALQMLRDAGAQVSIMTYDEFKHCWDTFVDHQGAPFQPWDGLDEHSQALSRRLRAILQNQGN

SEQ ID NO: 944 - protein, 189 aa, synthetic construct
MEASPASGPRHLMDPHTFYSNFNNKIGKTYLCYEVERLDNGTWVKMDQHRGFLHNQPRRHAELLFLDLVPSLQLDPAQIYRVTWFISWSPCFSWGCACEVRAFLQENTHVRLRIFAARIADHWPLYKEALQMLRDAGAQVSIMTYDEFKHCWDTFVDHQGAPFQPWDGLDEHSQALSRRLRAILQNQGN

SEQ ID NO: 945 - protein, 189 aa, synthetic construct
MEASPASGPRHLMDPHTFYSNFNNKIGRTYLCYEVERLDNGTWVKMDQHRGFLHNQPRRHAELLFLDLVPSLQLDPAQIYRVTWFISWSPCFSWGCACEVRAFLQENTHVRLRIFAARIADHWPLYKEALQMLRDAGAQVSIMTYDEFKHCWDTFVDHQGAPFQPWDGLDEHSQALSRRLRAILQNQGN

SEQ ID NO: 946 - protein, 189 aa, synthetic construct
MEASPASGPRHLMDPHTFYSNFNNKIGRHYLCYEVERLDNGTWVKMDQHRGFLHNQPRRHAELLFLDLVPSLQLDPAQIYRVTWFISWSPCFSWGCACEVRAFLQENTHVRLRIFAARIADHWPLYKEALQMLRDAGAQVSIMTYDEFKHCWDTFVDHQGAPFQPWDGLDEHSQALSRRLRAILQNQGN

SEQ ID NO: 947 - protein, 189 aa, synthetic construct
MEASPASGPRHLMDPHTFYSNFNNKIGRHKLCYEVERLDNGTWVKMDQHRGFLHNQPRRHAELLFLDLVPSLQLDPAQIYRVTWFISWSPCFSWGCACEVRAFLQENTHVRLRIFAARIADHWPLYKEALQMLRDAGAQVSIMTYDEFKHCWDTFVDHQGAPFQPWDGLDEHSQALSRRLRAILQNQGN

SEQ ID NO: 948 - protein, 189 aa, synthetic construct
MEASPASGPRHLMDPHTFYSNFNNKIGRHKTCYEVERLDNGTWVKMDQHRGFLHNQPRRHAELLFLDLVPSLQLDPAQIYRVTWFISWSPCFSWGCACEVRAFLQENTHVRLRIFAARIADHWPLYKEALQMLRDAGAQVSIMTYDEFKHCWDTFVDHQGAPFQPWDGLDEHSQALSRRLRAILQNQGN

SEQ ID NO: 949 - protein, 187 aa, synthetic construct
MEASPASGPRHLMDPHTFYSNFNNGRHKTYLCYEVERLDNGTWVKMDQHRGFLHNQPRRHAELLFLDLVPSLQLDPAQIYRVTWFISWSPCFSCACEVRAFLQENTHVRLRIFAARIADHWPLYKEALQMLRDAGAQVSIMTYDEFKHCWDTFVDHQGAPFQPWDGLDEHSQALSRRLRAILQNQGN

SEQ ID NO: 950 - protein, 187 aa, synthetic construct
MEASPASGPRHLMDPHTFYSNFNNKRHKTYLCYEVERLDNGTWVKMDQHRGFLHNQPRRHAELLFLDLVPSLQLDPAQIYRVTWFISWSPCFSCACEVRAFLQENTHVRLRIFAARIADHWPLYKEALQMLRDAGAQVSIMTYDEFKHCWDTFVDHQGAPFQPWDGLDEHSQALSRRLRAILQNQGN

SEQ ID NO: 951 - protein, 187 aa, synthetic construct
MEASPASGPRHLMDPHTFYSNFNNKIHKTYLCYEVERLDNGTWVKMDQHRGFLHNQPRRHAELLFLDLVPSLQLDPAQIYRVTWFISWSPCFSCACEVRAFLQENTHVRLRIFAARIADHWPLYKEALQMLRDAGAQVSIMTYDEFKHCWDTFVDHQGAPFQPWDGLDEHSQALSRRLRAILQNQGN

SEQ ID NO: 952 - protein, 187 aa, synthetic construct
MEASPASGPRHLMDPHTFYSNFNNKIGKTYLCYEVERLDNGTWVKMDQHRGFLHNQPRRHAELLFLDLVPSLQLDPAQIYRVTWFISWSPCFSCACEVRAFLQENTHVRLRIFAARIADHWPLYKEALQMLRDAGAQVSIMTYDEFKHCWDTFVDHQGAPFQPWDGLDEHSQALSRRLRAILQNQGN

SEQ ID NO: 953 - protein, 187 aa, synthetic construct
MEASPASGPRHLMDPHTFYSNFNNKIGRTYLCYEVERLDNGTWVKMDQHRGFLHNQPRRHAELLFLDLVPSLQLDPAQIYRVTWFISWSPCFSCACEVRAFLQENTHVRLRIFAARIADHWPLYKEALQMLRDAGAQVSIMTYDEFKHCWDTFVDHQGAPFQPWDGLDEHSQALSRRLRAILQNQGN

SEQ ID NO: 954 - protein, 187 aa, synthetic construct
MEASPASGPRHLMDPHTFYSNFNNKIGRHYLCYEVERLDNGTWVKMDQHRGFLHNQPRRHAELLFLDLVPSLQLDPAQIYRVTWFISWSPCFSCACEVRAFLQENTHVRLRIFAARIADHWPLYKEALQMLRDAGAQVSIMTYDEFKHCWDTFVDHQGAPFQPWDGLDEHSQALSRRLRAILQNQGN

SEQ ID NO: 955 - protein, 187 aa, synthetic construct
MEASPASGPRHLMDPHTFYSNFNNKIGRHKLCYEVERLDNGTWVKMDQHRGFLHNQPRRHAELLFLDLVPSLQLDPAQIYRVTWFISWSPCFSCACEVRAFLQENTHVRLRIFAARIADHWPLYKEALQMLRDAGAQVSIMTYDEFKHCWDTFVDHQGAPFQPWDGLDEHSQALSRRLRAILQNQGN

SEQ ID NO: 956 - protein, 187 aa, synthetic construct
MEASPASGPRHLMDPHTFYSNFNNKIGRHKTCYEVERLDNGTWVKMDQHRGFLHNQPRRHAELLFLDLVPSLQLDPAQIYRVTWFISWSPCFSCACEVRAFLQENTHVRLRIFAARIADHWPLYKEALQMLRDAGAQVSIMTYDEFKHCWDTFVDHQGAPFQPWDGLDEHSQALSRRLRAILQNQGN

SEQ ID NO: 957 - protein, 191 aa, synthetic construct
MEASPASGPRHLMDPHTFYSNFNNKIGRHKTYLCYEVERLDNGTWVKMDQHRGFLHNQPRRHAELLFLDLVPSLQLDPAQIYRVTWFISWSPCASWGCACEVRAFLQENTHVRLRIFAARIADHWPLYKEALQMLRDAGAQVSIMTYDEFKHCWDTFVDHQGAPFQPWDGLDEHSQALSRRLRAILQNQGN

SEQ ID NO: 958 - protein, 191 aa, synthetic construct
MEASPASGPRHLMDPHTFYSNFNNKIGRHKTYLCYEVERLDNGTWVKMDQHRGFLHNQPRRHAELLFLDLVPSLQLDPAQIYRVTWFISWSPCCSWGCACEVRAFLQENTHVRLRIFAARIADHWPLYKEALQMLRDAGAQVSIMTYDEFKHCWDTFVDHQGAPFQPWDGLDEHSQALSRRLRAILQNQGN

SEQ ID NO: 959 - protein, 191 aa, synthetic construct
MEASPASGPRHLMDPHTFYSNFNNKIGRHKTYLCYEVERLDNGTWVKMDQHRGFLHNQPRRHAELLFLDLVPSLQLDPAQIYRVTWFISWSPCDSWGCACEVRAFLQENTHVRLRIFAARIADHWPLYKEALQMLRDAGAQVSIMTYDEFKHCWDTFVDHQGAPFQPWDGLDEHSQALSRRLRAILQNQGN

SEQ ID NO: 960 - protein, 191 aa, synthetic construct
MEASPASGPRHLMDPHTFYSNFNNKIGRHKTYLCYEVERLDNGTWVKMDQHRGFLHNQPRRHAELLFLDLVPSLQLDPAQIYRVTWFISWSPCESWGCACEVRAFLQENTHVRLRIFAARIADHWPLYKEALQMLRDAGAQVSIMTYDEFKHCWDTFVDHQGAPFQPWDGLDEHSQALSRRLRAILQNQGN

SEQ ID NO: 961 - protein, 191 aa, synthetic construct
MEASPASGPRHLMDPHTFYSNFNNKIGRHKTYLCYEVERLDNGTWVKMDQHRGFLHNQPRRHAELLFLDLVPSLQLDPAQIYRVTWFISWSPCGSWGCACEVRAFLQENTHVRLRIFAARIADHWPLYKEALQMLRDAGAQVSIMTYDEFKHCWDTFVDHQGAPFQPWDGLDEHSQALSRRLRAILQNQGN

SEQ ID NO: 962 - protein, 191 aa, synthetic construct
MEASPASGPRHLMDPHTFYSNFNNKIGRHKTYLCYEVERLDNGTWVKMDQHRGFLHNQPRRHAELLFLDLVPSLQLDPAQIYRVTWFISWSPCHSWGCACEVRAFLQENTHVRLRIFAARIADHWPLYKEALQMLRDAGAQVSIMTYDEFKHCWDTFVDHQGAPFQPWDGLDEHSQALSRRLRAILQNQGN

SEQ ID NO: 963 - protein, 191 aa, synthetic construct
MEASPASGPRHLMDPHTFYSNFNNKIGRHKTYLCYEVERLDNGTWVKMDQHRGFLHNQPRRHAELLFLDLVPSLQLDPAQIYRVTWFISWSPCISWGCACEVRAFLQENTHVRLRIFAARIADHWPLYKEALQMLRDAGAQVSIMTYDEFKHCWDTFVDHQGAPFQPWDGLDEHSQALSRRLRAILQNQGN

SEQ ID NO: 964 - protein, 191 aa, synthetic construct
MEASPASGPRHLMDPHTFYSNFNNKIGRHKTYLCYEVERLDNGTWVKMDQHRGFLHNQPRRHAELLFLDLVPSLQLDPAQIYRVTWFISWSPCKSWGCACEVRAFLQENTHVRLRIFAARIADHWPLYKEALQMLRDAGAQVSIMTYDEFKHCWDTFVDHQGAPFQPWDGLDEHSQALSRRLRAILQNQGN

SEQ ID NO: 965 - protein, 191 aa, synthetic construct
MEASPASGPRHLMDPHTFYSNFNNKIGRHKTYLCYEVERLDNGTWVKMDQHRGFLHNQPRRHAELLFLDLVPSLQLDPAQIYRVTWFISWSPCLSWGCACEVRAFLQENTHVRLRIFAARIADHWPLYKEALQMLRDAGAQVSIMTYDEFKHCWDTFVDHQGAPFQPWDGLDEHSQALSRRLRAILQNQGN

SEQ ID NO: 966 - protein, 191 aa, synthetic construct
MEASPASGPRHLMDPHTFYSNFNNKIGRHKTYLCYEVERLDNGTWVKMDQHRGFLHNQPRRHAELLFLDLVPSLQLDPAQIYRVTWFISWSPCMSWGCACEVRAFLQENTHVRLRIFAARIADHWPLYKEALQMLRDAGAQVSIMTYDEFKHCWDTFVDHQGAPFQPWDGLDEHSQALSRRLRAILQNQGN

SEQ ID NO: 967 - skipped

SEQ ID NO: 968 - protein, 191 aa, synthetic construct
MEASPASGPRHLMDPHTFYSNFNNKIGRHKTYLCYEVERLDNGTWVKMDQHRGFLHNQPRRHAELLFLDLVPSLQLDPAQIYRVTWFISWSPCPSWGCACEVRAFLQENTHVRLRIFAARIADHWPLYKEALQMLRDAGAQVSIMTYDEFKHCWDTFVDHQGAPFQPWDGLDEHSQALSRRLRAILQNQGN

SEQ ID NO: 969 - protein, 191 aa, synthetic construct
MEASPASGPRHLMDPHTFYSNFNNKIGRHKTYLCYEVERLDNGTWVKMDQHRGFLHNQPRRHAELLFLDLVPSLQLDPAQIYRVTWFISWSPCQSWGCACEVRAFLQENTHVRLRIFAARIADHWPLYKEALQMLRDAGAQVSIMTYDEFKHCWDTFVDHQGAPFQPWDGLDEHSQALSRRLRAILQNQGN

SEQ ID NO: 970 - protein, 191 aa, synthetic construct
MEASPASGPRHLMDPHTFYSNFNNKIGRHKTYLCYEVERLDNGTWVKMDQHRGFLHNQPRRHAELLFLDLVPSLQLDPAQIYRVTWFISWSPCRSWGCACEVRAFLQENTHVRLRIFAARIADHWPLYKEALQMLRDAGAQVSIMTYDEFKHCWDTFVDHQGAPFQPWDGLDEHSQALSRRLRAILQNQGN

SEQ ID NO: 971 - protein, 191 aa, synthetic construct
MEASPASGPRHLMDPHTFYSNFNNKIGRHKTYLCYEVERLDNGTWVKMDQHRGFLHNQPRRHAELLFLDLVPSLQLDPAQIYRVTWFISWSPCSSWGCACEVRAFLQENTHVRLRIFAARIADHWPLYKEALQMLRDAGAQVSIMTYDEFKHCWDTFVDHQGAPFQPWDGLDEHSQALSRRLRAILQNQGN

SEQ ID NO: 972 - protein, 191 aa, synthetic construct
MEASPASGPRHLMDPHTFYSNFNNKIGRHKTYLCYEVERLDNGTWVKMDQHRGFLHNQPRRHAELLFLDLVPSLQLDPAQIYRVTWFISWSPCTSWGCACEVRAFLQENTHVRLRIFAARIADHWPLYKEALQMLRDAGAQVSIMTYDEFKHCWDTFVDHQGAPFQPWDGLDEHSQALSRRLRAILQNQGN

SEQ ID NO: 973 - protein, 191 aa, synthetic construct
MEASPASGPRHLMDPHTFYSNFNNKIGRHKTYLCYEVERLDNGTWVKMDQHRGFLHNQPRRHAELLFLDLVPSLQLDPAQIYRVTWFISWSPCVSWGCACEVRAFLQENTHVRLRIFAARIADHWPLYKEALQMLRDAGAQVSIMTYDEFKHCWDTFVDHQGAPFQPWDGLDEHSQALSRRLRAILQNQGN

SEQ ID NO: 974 - protein, 191 aa, synthetic construct
MEASPASGPRHLMDPHTFYSNFNNKIGRHKTYLCYEVERLDNGTWVKMDQHRGFLHNQPRRHAELLFLDLVPSLQLDPAQIYRVTWFISWSPCWSWGCACEVRAFLQENTHVRLRIFAARIADHWPLYKEALQMLRDAGAQVSIMTYDEFKHCWDTFVDHQGAPFQPWDGLDEHSQALSRRLRAILQNQGN

SEQ ID NO: 975 - protein, 191 aa, synthetic construct
MEASPASGPRHLMDPHTFYSNFNNKIGRHKTYLCYEVERLDNGTWVKMDQHRGFLHNQPRRHAELLFLDLVPSLQLDPAQIYRVTWFISWSPCYSWGCACEVRAFLQENTHVRLRIFAARIADHWPLYKEALQMLRDAGAQVSIMTYDEFKHCWDTFVDHQGAPFQPWDGLDEHSQALSRRLRAILQNQGN

SEQ ID NO: 976 - protein, 190 aa, synthetic construct
MEASPASGPRHLMDPHTFYSNFNNKIGRHKTYLCYEVERLDNGTWVKMDQHRGFLHNQPRRHAELLFLDLVPSLQLDPAQIYRVTWFISWSPCSWGCACEVRAFLQENTHVRLRIFAARIADHWPLYKEALQMLRDAGAQVSIMTYDEFKHCWDTFVDHQGAPFQPWDGLDEHSQALSRRLRAILQNQGN

SEQ ID NO: 977 - protein, 191 aa, synthetic construct
MEASPASGPRHLMDPHTFYSNFNNKIGRHKTYLCYEVERLDNGTWVKMDQHRGFLHNQPRRHAELLFLDLVPSLQLDPAQIYRVTWFISWSPCFSAGCACEVRAFLQENTHVRLRIFAARIADHWPLYKEALQMLRDAGAQVSIMTYDEFKHCWDTFVDHQGAPFQPWDGLDEHSQALSRRLRAILQNQGN

SEQ ID NO: 978 - skipped

SEQ ID NO: 979 - protein, 191 aa, synthetic construct
MEASPASGPRHLMDPHTFYSNFNNKIGRHKTYLCYEVERLDNGTWVKMDQHRGFLHNQPRRHAELLFLDLVPSLQLDPAQIYRVTWFISWSPCFSDGCACEVRAFLQENTHVRLRIFAARIADHWPLYKEALQMLRDAGAQVSIMTYDEFKHCWDTFVDHQGAPFQPWDGLDEHSQALSRRLRAILQNQGN

SEQ ID NO: 980 - protein, 191 aa, synthetic construct
MEASPASGPRHLMDPHTFYSNFNNKIGRHKTYLCYEVERLDNGTWVKMDQHRGFLHNQPRRHAELLFLDLVPSLQLDPAQIYRVTWFISWSPCFSEGCACEVRAFLQENTHVRLRIFAARIADHWPLYKEALQMLRDAGAQVSIMTYDEFKHCWDTFVDHQGAPFQPWDGLDEHSQALSRRLRAILQNQGN

SEQ ID NO: 981 - protein, 191 aa, synthetic construct
MEASPASGPRHLMDPHTFYSNFNNKIGRHKTYLCYEVERLDNGTWVKMDQHRGFLHNQPRRHAELLFLDLVPSLQLDPAQIYRVTWFISWSPCFSFGCACEVRAFLQENTHVRLRIFAARIADHWPLYKEALQMLRDAGAQVSIMTYDEFKHCWDTFVDHQGAPFQPWDGLDEHSQALSRRLRAILQNQGN

SEQ ID NO: 982 - protein, 191 aa, synthetic construct
MEASPASGPRHLMDPHTFYSNFNNKIGRHKTYLCYEVERLDNGTWVKMDQHRGFLHNQPRRHAELLFLDLVPSLQLDPAQIYRVTWFISWSPCFSGGCACEVRAFLQENTHVRLRIFAARIADHWPLYKEALQMLRDAGAQVSIMTYDEFKHCWDTFVDHQGAPFQPWDGLDEHSQALSRRLRAILQNQGN

SEQ ID NO: 983 - protein, 191 aa, synthetic construct
MEASPASGPRHLMDPHTFYSNFNNKIGRHKTYLCYEVERLDNGTWVKMDQHRGFLHNQPRRHAELLFLDLVPSLQLDPAQIYRVTWFISWSPCFSHGCACEVRAFLQENTHVRLRIFAARIADHWPLYKEALQMLRDAGAQVSIMTYDEFKHCWDTFVDHQGAPFQPWDGLDEHSQALSRRLRAILQNQGN

SEQ ID NO: 984 - protein, 191 aa, synthetic construct
MEASPASGPRHLMDPHTFYSNFNNKIGRHKTYLCYEVERLDNGTWVKMDQHRGFLHNQPRRHAELLFLDLVPSLQLDPAQIYRVTWFISWSPCFSIGCACEVRAFLQENTHVRLRIFAARIADHWPLYKEALQMLRDAGAQVSIMTYDEFKHCWDTFVDHQGAPFQPWDGLDEHSQALSRRLRAILQNQGN

SEQ ID NO: 985 - protein, 191 aa, synthetic construct
MEASPASGPRHLMDPHTFYSNFNNKIGRHKTYLCYEVERLDNGTWVKMDQHRGFLHNQPRRHAELLFLDLVPSLQLDPAQIYRVTWFISWSPCFSKGCACEVRAFLQENTHVRLRIFAARIADHWPLYKEALQMLRDAGAQVSIMTYDEFKHCWDTFVDHQGAPFQPWDGLDEHSQALSRRLRAILQNQGN

SEQ ID NO: 986 - skipped

SEQ ID NO: 987 - protein, 191 aa, synthetic construct
MEASPASGPRHLMDPHTFYSNFNNKIGRHKTYLCYEVERLDNGTWVKMDQHRGFLHNQPRRHAELLFLDLVPSLQLDPAQIYRVTWFISWSPCFSMGCACEVRAFLQENTHVRLRIFAARIADHWPLYKEALQMLRDAGAQVSIMTYDEFKHCWDTFVDHQGAPFQPWDGLDEHSQALSRRLRAILQNQGN

SEQ ID NO: 988 - protein, 191 aa, synthetic construct
MEASPASGPRHLMDPHTFYSNFNNKIGRHKTYLCYEVERLDNGTWVKMDQHRGFLHNQPRRHAELLFLDLVPSLQLDPAQIYRVTWFISWSPCFSNGCACEVRAFLQENTHVRLRIFAARIADHWPLYKEALQMLRDAGAQVSIMTYDEFKHCWDTFVDHQGAPFQPWDGLDEHSQALSRRLRAILQNQGN

SEQ ID NO: 989 - protein, 191 aa, synthetic construct
MEASPASGPRHLMDPHTFYSNFNNKIGRHKTYLCYEVERLDNGTWVKMDQHRGFLHNQPRRHAELLFLDLVPSLQLDPAQIYRVTWFISWSPCFSPGCACEVRAFLQENTHVRLRIFAARIADHWPLYKEALQMLRDAGAQVSIMTYDEFKHCWDTFVDHQGAPFQPWDGLDEHSQALSRRLRAILQNQGN

SEQ ID NO: 990 - protein, 191 aa, synthetic construct
MEASPASGPRHLMDPHTFYSNFNNKIGRHKTYLCYEVERLDNGTWVKMDQHRGFLHNQPRRHAELLFLDLVPSLQLDPAQIYRVTWFISWSPCFSQGCACEVRAFLQENTHVRLRIFAARIADHWPLYKEALQMLRDAGAQVSIMTYDEFKHCWDTFVDHQGAPFQPWDGLDEHSQALSRRLRAILQNQGN

SEQ ID NO: 991 - skipped

SEQ ID NO: 992 - protein, 191 aa, synthetic construct
MEASPASGPRHLMDPHTFYSNFNNKIGRHKTYLCYEVERLDNGTWVKMDQHRGFLHNQPRRHAELLFLDLVPSLQLDPAQIYRVTWFISWSPCFSSGCACEVRAFLQENTHVRLRIFAARIADHWPLYKEALQMLRDAGAQVSIMTYDEFKHCWDTFVDHQGAPFQPWDGLDEHSQALSRRLRAILQNQGN

SEQ ID NO: 993 - protein, 191 aa, synthetic construct
MEASPASGPRHLMDPHTFYSNFNNKIGRHKTYLCYEVERLDNGTWVKMDQHRGFLHNQPRRHAELLFLDLVPSLQLDPAQIYRVTWFISWSPCFSTGCACEVRAFLQENTHVRLRIFAARIADHWPLYKEALQMLRDAGAQVSIMTYDEFKHCWDTFVDHQGAPFQPWDGLDEHSQALSRRLRAILQNQGN

SEQ ID NO: 994 - protein, 191 aa, synthetic construct
MEASPASGPRHLMDPHTFYSNFNNKIGRHKTYLCYEVERLDNGTWVKMDQHRGFLHNQPRRHAELLFLDLVPSLQLDPAQIYRVTWFISWSPCFSVGCACEVRAFLQENTHVRLRIFAARIADHWPLYKEALQMLRDAGAQVSIMTYDEFKHCWDTFVDHQGAPFQPWDGLDEHSQALSRRLRAILQNQGN

SEQ ID NO: 995 - protein, 191 aa, synthetic construct
MEASPASGPRHLMDPHTFYSNFNNKIGRHKTYLCYEVERLDNGTWVKMDQHRGFLHNQPRRHAELLFLDLVPSLQLDPAQIYRVTWFISWSPCFSYGCACEVRAFLQENTHVRLRIFAARIADHWPLYKEALQMLRDAGAQVSIMTYDEFKHCWDTFVDHQGAPFQPWDGLDEHSQALSRRLRAILQNQGN

SEQ ID NO: 996 - protein, 190 aa, synthetic construct
MEASPASGPRHLMDPHTFYSNFNNKIGRHKTYLCYEVERLDNGTWVKMDQHRGFLHNQPRRHAELLFLDLVPSLQLDPAQIYRVTWFISWSPCFSGCACEVRAFLQENTHVRLRIFAARIADHWPLYKEALQMLRDAGAQVSIMTYDEFKHCWDTFVDHQGAPFQPWDGLDEHSQALSRRLRAILQNQGN

SEQ ID NO: 997 - protein, 191 aa, synthetic construct
MEASPASGPRHLMDPHTFYSNFNNKIGRHKTYLCYEVERLDNGTWVKMDQHRGFLHNQPRRHAELLFLDLVPSLQLDPAQIYRVTWFISWSPCFSWGCACEVRAFLAENTHVRLRIFAARIADHWPLYKEALQMLRDAGAQVSIMTYDEFKHCWDTFVDHQGAPFQPWDGLDEHSQALSRRLRAILQNQGN

SEQ ID NO: 998 - skipped

SEQ ID NO: 999 - protein, 191 aa, synthetic construct
MEASPASGPRHLMDPHTFYSNFNNKIGRHKTYLCYEVERLDNGTWVKMDQHRGFLHNQPRRHAELLFLDLVPSLQLDPAQIYRVTWFISWSPCFSWGCACEVRAFLDENTHVRLRIFAARIADHWPLYKEALQMLRDAGAQVSIMTYDEFKHCWDTFVDHQGAPFQPWDGLDEHSQALSRRLRAILQNQGN

SEQ ID NO: 1000 - protein, 191 aa, synthetic construct
MEASPASGPRHLMDPHTFYSNFNNKIGRHKTYLCYEVERLDNGTWVKMDQHRGFLHNQPRRHAELLFLDLVPSLQLDPAQIYRVTWFISWSPCFSWGCACEVRAFLEENTHVRLRIFAARIADHWPLYKEALQMLRDAGAQVSIMTYDEFKHCWDTFVDHQGAPFQPWDGLDEHSQALSRRLRAILQNQGN

SEQ ID NO: 1001 - protein, 191 aa, synthetic construct
MEASPASGPRHLMDPHTFYSNFNNKIGRHKTYLCYEVERLDNGTWVKMDQHRGFLHNQPRRHAELLFLDLVPSLQLDPAQIYRVTWFISWSPCFSWGCACEVRAFLFENTHVRLRIFAARIADHWPLYKEALQMLRDAGAQVSIMTYDEFKHCWDTFVDHQGAPFQPWDGLDEHSQALSRRLRAILQNQGN

SEQ ID NO: 1002 - protein, 191 aa, synthetic construct
MEASPASGPRHLMDPHTFYSNFNNKIGRHKTYLCYEVERLDNGTWVKMDQHRGFLHNQPRRHAELLFLDLVPSLQLDPAQIYRVTWFISWSPCFSWGCACEVRAFLGENTHVRLRIFAARIADHWPLYKEALQMLRDAGAQVSIMTYDEFKHCWDTFVDHQGAPFQPWDGLDEHSQALSRRLRAILQNQGN

SEQ ID NO: 1003 - protein, 191 aa, synthetic construct
MEASPASGPRHLMDPHTFYSNFNNKIGRHKTYLCYEVERLDNGTWVKMDQHRGFLHNQPRRHAELLFLDLVPSLQLDPAQIYRVTWFISWSPCFSWGCACEVRAFLHENTHVRLRIFAARIADHWPLYKEALQMLRDAGAQVSIMTYDEFKHCWDTFVDHQGAPFQPWDGLDEHSQALSRRLRAILQNQGN

SEQ ID NO: 1004 - protein, 191 aa, synthetic construct
MEASPASGPRHLMDPHTFYSNFNNKIGRHKTYLCYEVERLDNGTWVKMDQHRGFLHNQPRRHAELLFLDLVPSLQLDPAQIYRVTWFISWSPCFSWGCACEVRAFLIENTHVRLRIFAARIADHWPLYKEALQMLRDAGAQVSIMTYDEFKHCWDTFVDHQGAPFQPWDGLDEHSQALSRRLRAILQNQGN

SEQ ID NO: 1005-1007 - skipped (3 entries)

SEQ ID NO: 1008 - protein, 191 aa, synthetic construct
MEASPASGPRHLMDPHTFYSNFNNKIGRHKTYLCYEVERLDNGTWVKMDQHRGFLHNQPRRHAELLFLDLVPSLQLDPAQIYRVTWFISWSPCFSWGCACEVRAFLNENTHVRLRIFAARIADHWPLYKEALQMLRDAGAQVSIMTYDEFKHCWDTFVDHQGAPFQPWDGLDEHSQALSRRLRAILQNQGN

SEQ ID NO: 1009 - protein, 191 aa, synthetic construct
MEASPASGPRHLMDPHTFYSNFNNKIGRHKTYLCYEVERLDNGTWVKMDQHRGFLHNQPRRHAELLFLDLVPSLQLDPAQIYRVTWFISWSPCFSWGCACEVRAFLPENTHVRLRIFAARIADHWPLYKEALQMLRDAGAQVSIMTYDEFKHCWDTFVDHQGAPFQPWDGLDEHSQALSRRLRAILQNQGN

SEQ ID NO: 1010 - protein, 191 aa, synthetic construct
MEASPASGPRHLMDPHTFYSNFNNKIGRHKTYLCYEVERLDNGTWVKMDQHRGFLHNQPRRHAELLFLDLVPSLQLDPAQIYRVTWFISWSPCFSWGCACEVRAFLRENTHVRLRIFAARIADHWPLYKEALQMLRDAGAQVSIMTYDEFKHCWDTFVDHQGAPFQPWDGLDEHSQALSRRLRAILQNQGN

SEQ ID NO: 1011 - protein, 191 aa, synthetic construct
MEASPASGPRHLMDPHTFYSNFNNKIGRHKTYLCYEVERLDNGTWVKMDQHRGFLHNQPRRHAELLFLDLVPSLQLDPAQIYRVTWFISWSPCFSWGCACEVRAFLSENTHVRLRIFAARIADHWPLYKEALQMLRDAGAQVSIMTYDEFKHCWDTFVDHQGAPFQPWDGLDEHSQALSRRLRAILQNQGN

SEQ ID NO: 1012 - protein, 191 aa, synthetic construct
MEASPASGPRHLMDPHTFYSNFNNKIGRHKTYLCYEVERLDNGTWVKMDQHRGFLHNQPRRHAELLFLDLVPSLQLDPAQIYRVTWFISWSPCFSWGCACEVRAFLTENTHVRLRIFAARIADHWPLYKEALQMLRDAGAQVSIMTYDEFKHCWDTFVDHQGAPFQPWDGLDEHSQALSRRLRAILQNQGN

SEQ ID NO: 1013 - protein, 191 aa, synthetic construct
MEASPASGPRHLMDPHTFYSNFNNKIGRHKTYLCYEVERLDNGTWVKMDQHRGFLHNQPRRHAELLFLDLVPSLQLDPAQIYRVTWFISWSPCFSWGCACEVRAFLVENTHVRLRIFAARIADHWPLYKEALQMLRDAGAQVSIMTYDEFKHCWDTFVDHQGAPFQPWDGLDEHSQALSRRLRAILQNQGN

SEQ ID NO: 1014-1015 - skipped (2 entries)

SEQ ID NO: 1016 - protein, 190 aa, synthetic construct
MEASPASGPRHLMDPHTFYSNFNNKIGRHKTYLCYEVERLDNGTWVKMDQHRGFLHNQPRRHAELLFLDLVPSLQLDPAQIYRVTWFISWSPCFSWGCACEVRAFLENTHVRLRIFAARIADHWPLYKEALQMLRDAGAQVSIMTYDEFKHCWDTFVDHQGAPFQPWDGLDEHSQALSRRLRAILQNQGN

SEQ ID NO: 1017 - skipped

SEQ ID NO: 1018 - protein, 191 aa, synthetic construct
MEASPASGPRHLMDPHTFYSNFNNKIGRHKTYLCYEVERLDNGTWVKMDQHRGFLHNQPRRHAELLFLDLVPSLQLDPAQIYRVTWFISWSPCFSWGCACEVRAFLQENTHVRLRIFAARIADHWPLYKEALQCLRDAGAQVSIMTYDEFKHCWDTFVDHQGAPFQPWDGLDEHSQALSRRLRAILQNQGN

SEQ ID NO: 1019 - protein, 191 aa, synthetic construct
MEASPASGPRHLMDPHTFYSNFNNKIGRHKTYLCYEVERLDNGTWVKMDQHRGFLHNQPRRHAELLFLDLVPSLQLDPAQIYRVTWFISWSPCFSWGCACEVRAFLQENTHVRLRIFAARIADHWPLYKEALQDLRDAGAQVSIMTYDEFKHCWDTFVDHQGAPFQPWDGLDEHSQALSRRLRAILQNQGN

SEQ ID NO: 1020 - protein, 191 aa, synthetic construct
MEASPASGPRHLMDPHTFYSNFNNKIGRHKTYLCYEVERLDNGTWVKMDQHRGFLHNQPRRHAELLFLDLVPSLQLDPAQIYRVTWFISWSPCFSWGCACEVRAFLQENTHVRLRIFAARIADHWPLYKEALQELRDAGAQVSIMTYDEFKHCWDTFVDHQGAPFQPWDGLDEHSQALSRRLRAILQNQGN

SEQ ID NO: 1021 - protein, 191 aa, synthetic construct
MEASPASGPRHLMDPHTFYSNFNNKIGRHKTYLCYEVERLDNGTWVKMDQHRGFLHNQPRRHAELLFLDLVPSLQLDPAQIYRVTWFISWSPCFSWGCACEVRAFLQENTHVRLRIFAARIADHWPLYKEALQFLRDAGAQVSIMTYDEFKHCWDTFVDHQGAPFQPWDGLDEHSQALSRRLRAILQNQGN

SEQ ID NO: 1022 - protein, 191 aa, synthetic construct
MEASPASGPRHLMDPHTFYSNFNNKIGRHKTYLCYEVERLDNGTWVKMDQHRGFLHNQPRRHAELLFLDLVPSLQLDPAQIYRVTWFISWSPCFSWGCACEVRAFLQENTHVRLRIFAARIADHWPLYKEALQGLRDAGAQVSIMTYDEFKHCWDTFVDHQGAPFQPWDGLDEHSQALSRRLRAILQNQGN

SEQ ID NO: 1023 - protein, 191 aa, synthetic construct
MEASPASGPRHLMDPHTFYSNFNNKIGRHKTYLCYEVERLDNGTWVKMDQHRGFLHNQPRRHAELLFLDLVPSLQLDPAQIYRVTWFISWSPCFSWGCACEVRAFLQENTHVRLRIFAARIADHWPLYKEALQHLRDAGAQVSIMTYDEFKHCWDTFVDHQGAPFQPWDGLDEHSQALSRRLRAILQNQGN

SEQ ID NO: 1024 - protein, 191 aa, synthetic construct
MEASPASGPRHLMDPHTFYSNFNNKIGRHKTYLCYEVERLDNGTWVKMDQHRGFLHNQPRRHAELLFLDLVPSLQLDPAQIYRVTWFISWSPCFSWGCACEVRAFLQENTHVRLRIFAARIADHWPLYKEALQILRDAGAQVSIMTYDEFKHCWDTFVDHQGAPFQPWDGLDEHSQALSRRLRAILQNQGN

SEQ ID NO: 1025 - protein, 191 aa, synthetic construct
MEASPASGPRHLMDPHTFYSNFNNKIGRHKTYLCYEVERLDNGTWVKMDQHRGFLHNQPRRHAELLFLDLVPSLQLDPAQIYRVTWFISWSPCFSWGCACEVRAFLQENTHVRLRIFAARIADHWPLYKEALQKLRDAGAQVSIMTYDEFKHCWDTFVDHQGAPFQPWDGLDEHSQALSRRLRAILQNQGN

SEQ ID NO: 1026 - skipped

SEQ ID NO: 1027 - protein, 191 aa, synthetic construct
MEASPASGPRHLMDPHTFYSNFNNKIGRHKTYLCYEVERLDNGTWVKMDQHRGFLHNQPRRHAELLFLDLVPSLQLDPAQIYRVTWFISWSPCFSWGCACEVRAFLQENTHVRLRIFAARIADHWPLYKEALQNLRDAGAQVSIMTYDEFKHCWDTFVDHQGAPFQPWDGLDEHSQALSRRLRAILQNQGN

SEQ ID NO: 1028 - protein, 191 aa, synthetic construct
MEASPASGPRHLMDPHTFYSNFNNKIGRHKTYLCYEVERLDNGTWVKMDQHRGFLHNQPRRHAELLFLDLVPSLQLDPAQIYRVTWFISWSPCFSWGCACEVRAFLQENTHVRLRIFAARIADHWPLYKEALQPLRDAGAQVSIMTYDEFKHCWDTFVDHQGAPFQPWDGLDEHSQALSRRLRAILQNQGN

SEQ ID NO: 1029 - protein, 191 aa, synthetic construct
MEASPASGPRHLMDPHTFYSNFNNKIGRHKTYLCYEVERLDNGTWVKMDQHRGFLHNQPRRHAELLFLDLVPSLQLDPAQIYRVTWFISWSPCFSWGCACEVRAFLQENTHVRLRIFAARIADHWPLYKEALQQLRDAGAQVSIMTYDEFKHCWDTFVDHQGAPFQPWDGLDEHSQALSRRLRAILQNQGN

SEQ ID NO: 1030 - skipped

SEQ ID NO: 1031 - protein, 191 aa, synthetic construct
MEASPASGPRHLMDPHTFYSNFNNKIGRHKTYLCYEVERLDNGTWVKMDQHRGFLHNQPRRHAELLFLDLVPSLQLDPAQIYRVTWFISWSPCFSWGCACEVRAFLQENTHVRLRIFAARIADHWPLYKEALQSLRDAGAQVSIMTYDEFKHCWDTFVDHQGAPFQPWDGLDEHSQALSRRLRAILQNQGN

SEQ ID NO: 1032 - skipped

SEQ ID NO: 1033 - protein, 191 aa, synthetic construct
MEASPASGPRHLMDPHTFYSNFNNKIGRHKTYLCYEVERLDNGTWVKMDQHRGFLHNQPRRHAELLFLDLVPSLQLDPAQIYRVTWFISWSPCFSWGCACEVRAFLQENTHVRLRIFAARIADHWPLYKEALQVLRDAGAQVSIMTYDEFKHCWDTFVDHQGAPFQPWDGLDEHSQALSRRLRAILQNQGN

SEQ ID NO: 1034 - skipped

SEQ ID NO: 1035 - protein, 191 aa, synthetic construct
MEASPASGPRHLMDPHTFYSNFNNKIGRHKTYLCYEVERLDNGTWVKMDQHRGFLHNQPRRHAELLFLDLVPSLQLDPAQIYRVTWFISWSPCFSWGCACEVRAFLQENTHVRLRIFAARIADHWPLYKEALQYLRDAGAQVSIMTYDEFKHCWDTFVDHQGAPFQPWDGLDEHSQALSRRLRAILQNQGN

SEQ ID NO: 1036 - protein, 190 aa, synthetic construct
MEASPASGPRHLMDPHTFYSNFNNKIGRHKTYLCYEVERLDNGTWVKMDQHRGFLHNQPRRHAELLFLDLVPSLQLDPAQIYRVTWFISWSPCFSWGCACEVRAFLQENTHVRLRIFAARIADHWPLYKEALQLRDAGAQVSIMTYDEFKHCWDTFVDHQGAPFQPWDGLDEHSQALSRRLRAILQNQGN

SEQ ID NO: 1037 - protein, 189 aa, synthetic construct
MEASPASGPRHLMDPHTFYSNFNNKIGRHKTYLCYEVERLDNGTWVKMDQHRGFLHNQPRRHAELLFLDLVPSLQLDPAQIYRVTWFISWSPCFSCACEVRAFLQENTHVRLRIFAARIADHWPLYKEALQCLRDAGAQVSIMTYDEFKHCWDTFVDHQGAPFQPWDGLDEHSQALSRRLRAILQNQGN

SEQ ID NO: 1038 - protein, 189 aa, synthetic construct
MEASPASGPRHLMDPHTFYSNFNNKIGRHKTYLCYEVERLDNGTWVKMDQHRGFLHNQPRRHAELLFLDLVPSLQLDPAQIYRVTWFISWSPCCSCACEVRAFLQENTHVRLRIFAARIADHWPLYKEALQMLRDAGAQVSIMTYDEFKHCWDTFVDHQGAPFQPWDGLDEHSQALSRRLRAILQNQGN

SEQ ID NO: 1039 - protein, 189 aa, synthetic construct
MEASPASGPRHLMDPHTFYSNFNNKIGRHKTYLCYEVERLDNGTWVKMDQHRGFLHNQPRRHAELLFLDLVPSLQLDPAQIYRVTWFISWSPCFSCACEVRCFLQENTHVRLRIFAARIADHWPLYKEALQMLRDAGAQVSIMTYDEFKHCWDTFVDHQGAPFQPWDGLDEHSQALSRRLRAILQNQGN

SEQ ID NO: 1040 - protein, 191 aa, synthetic construct
MEASPASGPRHLMDPHTFYSNFNNKIGRHKTYLCYEVERLDNGTWVKMDQHRGFLHNQPRRHAELLFLDLVPSLQLDPAQIYRVTWFISWSPCFSWGCACEVRCFLQENTHVRLRIFAARIADHWPLYKEALQMLRDAGAQVSIMTYDEFKHCWDTFVDHQGAPFQPWDGLDEHSQALSRRLRAILQNQGN

SEQ ID NO: 1041 - protein, 191 aa, synthetic construct
MEASPASGPRHLMDPHTFYSNFNNKIGRHKTYLCYEVERLDNGTWVKMDQHRGFLHNQPRRHAELLFLDLVPSLQLDPAQIYRVTWFISWSPCFSWGCACEVYAFLQENTHVRLRIFAARIADHWPLYKEALQCLRDAGAQVSIMTYDEFKHCWDTFVDHQGAPFQPWDGLDEHSQALSRRLRAILQNQGN

SEQ ID NO: 1042 - protein, 191 aa, synthetic construct
MEASPASGPRHLMDPHTFYSNFNNKIGRHKTYLCYEVERLDNGTWVKMDQHRGFLHNQPRRHAELLFLDLVPSLQLDPAQIYRVTWFISWSPCCSWGCACEVRAFLQENTHVRLRIFAARIADHWPLYKEALQYLRDAGAQVSIMTYDEFKHCWDTFVDHQGAPFQPWDGLDEHSQALSRRLRAILQNQGN

SEQ ID NO: 1043 - protein, 191 aa, synthetic construct
MEASPASGPRHLMDPHTFYSNFNNKIGRHKTYLCYEVERLDNGTWVKMDQHRGFLHNQPRRHAELLFLDLVPSLQLDPAQIYRVTWFISWSPCFSWGCACEVYCFLQENTHVRLRIFAARIADHWPLYKEALQMLRDAGAQVSIMTYDEFKHCWDTFVDHQGAPFQPWDGLDEHSQALSRRLRAILQNQGN

SEQ ID NO: 1044 - protein, 189 aa, synthetic construct
MEASPASGPRHLMDPHTFYSNFNNKIGRHKTYLCYEVERLDNGTWVKMDQHRGFLHNQPRRHAELLFLDLVPSLQLDPAQIYRVTWFISWSPCCSCACEVYAFLQENTHVRLRIFAARIADHWPLYKEALQMLRDAGAQVSIMTYDEFKHCWDTFVDHQGAPFQPWDGLDEHSQALSRRLRAILQNQGN

SEQ ID NO: 1045 - protein, 191 aa, synthetic construct
MEASPASGPRHLMDPHTFYSNFNNKIGRHKTYLCYEVERLDNGTWVKMDQHRGFLHNQPRRHAELLFLDLVPSLQLDPAQIYRVTWFISWSPCFSWGCACEVWAFLQENTHVRLRIFAARIADHWPLYKEALQCLRDAGAQVSIMTYDEFKHCWDTFVDHQGAPFQPWDGLDEHSQALSRRLRAILQNQGN

SEQ ID NO: 1046 - protein, 191 aa, synthetic construct
MEASPASGPRHLMDPHTFYSNFNNKIGRHKTYLCYEVERLDNGTWVKMDQHRGFLHNQPRRHAELLFLDLVPSLQLDPAQIYRVTWFISWSPCCSWGCACEVRAFLQENTHVRLRIFAARIADHWPLYKEALQWLRDAGAQVSIMTYDEFKHCWDTFVDHQGAPFQPWDGLDEHSQALSRRLRAILQNQGN

SEQ ID NO: 1047 - protein, 191 aa, synthetic construct
MEASPASGPRHLMDPHTFYSNFNNKIGRHKTYLCYEVERLDNGTWVKMDQHRGFLHNQPRRHAELLFLDLVPSLQLDPAQIYRVTWFISWSPCFSWGCACEVWCFLQENTHVRLRIFAARIADHWPLYKEALQMLRDAGAQVSIMTYDEFKHCWDTFVDHQGAPFQPWDGLDEHSQALSRRLRAILQNQGN

SEQ ID NO: 1048 - protein, 194 aa, synthetic construct
MEASPASGPRHLMDPHTFYSNFKNVRWAKGRRETYLCYEVERLDNGTWVKMDQHRGFLHNQPRRHAELLFLDLVPSLQLDPAQIYRVTWFISWSPCFSWGCACEVRAFLQENTHVRLRIFAARIADHWPLYKEALQMLRDAGAQVSIMTYDEFKHCWDTFVDHQGAPFQPWDGLDEHSQALSRRLRAILQNQGN

SEQ ID NO: 1049 - protein, 194 aa, synthetic construct
MEASPASGPRHLMDPHTFYSNFNNEPWVRGRHETYLCYEVERLDNGTWVKMDQHRGFLHNQPRRHAELLFLDLVPSLQLDPAQIYRVTWFISWSPCFSWGCACEVRAFLQENTHVRLRIFAARIADHWPLYKEALQMLRDAGAQVSIMTYDEFKHCWDTFVDHQGAPFQPWDGLDEHSQALSRRLRAILQNQGN

SEQ ID NO: 1050 - protein, 197 aa, synthetic construct
MEASPASGPRHLMDPHTFYSNFNNKRRLRRPYYPRKALLCYEVERLDNGTWVKMDQHRGFLHNQPRRHAELLFLDLVPSLQLDPAQIYRVTWFISWSPCFSWGCACEVRAFLQENTHVRLRIFAARIADHWPLYKEALQMLRDAGAQVSIMTYDEFKHCWDTFVDHQGAPFQPWDGLDEHSQALSRRLRAILQNQGN

SEQ ID NO: 1051 - skipped

SEQ ID NO: 1052 - protein, 192 aa, synthetic construct
MEASPASGPRHLMDPHTFYSNFNNKCIGRHKTYLCYEVERLDNGTWVKMDQHRGFLHNQPRRHAELLFLDLVPSLQLDPAQIYRVTWFISWSPCFSWGCACEVRAFLQENTHVRLRIFAARIADHWPLYKEALQMLRDAGAQVSIMTYDEFKHCWDTFVDHQGAPFQPWDGLDEHSQALSRRLRAILQNQGN

SEQ ID NO: 1053 - protein, 192 aa, synthetic construct
MEASPASGPRHLMDPHTFYSNFNNKDIGRHKTYLCYEVERLDNGTWVKMDQHRGFLHNQPRRHAELLFLDLVPSLQLDPAQIYRVTWFISWSPCFSWGCACEVRAFLQENTHVRLRIFAARIADHWPLYKEALQMLRDAGAQVSIMTYDEFKHCWDTFVDHQGAPFQPWDGLDEHSQALSRRLRAILQNQGN

SEQ ID NO: 1054 - protein, 192 aa, synthetic construct
MEASPASGPRHLMDPHTFYSNFNNKEIGRHKTYLCYEVERLDNGTWVKMDQHRGFLHNQPRRHAELLFLDLVPSLQLDPAQIYRVTWFISWSPCFSWGCACEVRAFLQENTHVRLRIFAARIADHWPLYKEALQMLRDAGAQVSIMTYDEFKHCWDTFVDHQGAPFQPWDGLDEHSQALSRRLRAILQNQGN

SEQ ID NO: 1055 - protein, 192 aa, synthetic construct
MEASPASGPRHLMDPHTFYSNFNNKFIGRHKTYLCYEVERLDNGTWVKMDQHRGFLHNQPRRHAELLFLDLVPSLQLDPAQIYRVTWFISWSPCFSWGCACEVRAFLQENTHVRLRIFAARIADHWPLYKEALQMLRDAGAQVSIMTYDEFKHCWDTFVDHQGAPFQPWDGLDEHSQALSRRLRAILQNQGN

SEQ ID NO: 1056 - protein, 192 aa, synthetic construct
MEASPASGPRHLMDPHTFYSNFNNKGIGRHKTYLCYEVERLDNGTWVKMDQHRGFLHNQPRRHAELLFLDLVPSLQLDPAQIYRVTWFISWSPCFSWGCACEVRAFLQENTHVRLRIFAARIADHWPLYKEALQMLRDAGAQVSIMTYDEFKHCWDTFVDHQGAPFQPWDGLDEHSQALSRRLRAILQNQGN

SEQ ID NO: 1057 - protein, 192 aa, synthetic construct
MEASPASGPRHLMDPHTFYSNFNNKHIGRHKTYLCYEVERLDNGTWVKMDQHRGFLHNQPRRHAELLFLDLVPSLQLDPAQIYRVTWFISWSPCFSWGCACEVRAFLQENTHVRLRIFAARIADHWPLYKEALQMLRDAGAQVSIMTYDEFKHCWDTFVDHQGAPFQPWDGLDEHSQALSRRLRAILQNQGN

SEQ ID NO: 1058 - skipped

SEQ ID NO: 1059 - protein, 192 aa, synthetic construct
MEASPASGPRHLMDPHTFYSNFNNKKIGRHKTYLCYEVERLDNGTWVKMDQHRGFLHNQPRRHAELLFLDLVPSLQLDPAQIYRVTWFISWSPCFSWGCACEVRAFLQENTHVRLRIFAARIADHWPLYKEALQMLRDAGAQVSIMTYDEFKHCWDTFVDHQGAPFQPWDGLDEHSQALSRRLRAILQNQGN

SEQ ID NO: 1060 - protein, 192 aa, synthetic construct
MEASPASGPRHLMDPHTFYSNFNNKLIGRHKTYLCYEVERLDNGTWVKMDQHRGFLHNQPRRHAELLFLDLVPSLQLDPAQIYRVTWFISWSPCFSWGCACEVRAFLQENTHVRLRIFAARIADHWPLYKEALQMLRDAGAQVSIMTYDEFKHCWDTFVDHQGAPFQPWDGLDEHSQALSRRLRAILQNQGN

SEQ ID NO: 1061 - protein, 192 aa, synthetic construct
MEASPASGPRHLMDPHTFYSNFNNKMIGRHKTYLCYEVERLDNGTWVKMDQHRGFLHNQPRRHAELLFLDLVPSLQLDPAQIYRVTWFISWSPCFSWGCACEVRAFLQENTHVRLRIFAARIADHWPLYKEALQMLRDAGAQVSIMTYDEFKHCWDTFVDHQGAPFQPWDGLDEHSQALSRRLRAILQNQGN

SEQ ID NO: 1062 - protein, 192 aa, synthetic construct
MEASPASGPRHLMDPHTFYSNFNNKNIGRHKTYLCYEVERLDNGTWVKMDQHRGFLHNQPRRHAELLFLDLVPSLQLDPAQIYRVTWFISWSPCFSWGCACEVRAFLQENTHVRLRIFAARIADHWPLYKEALQMLRDAGAQVSIMTYDEFKHCWDTFVDHQGAPFQPWDGLDEHSQALSRRLRAILQNQGN

SEQ ID NO: 1063 - skipped

SEQ ID NO: 1064 - protein, 192 aa, synthetic construct
MEASPASGPRHLMDPHTFYSNFNNKQIGRHKTYLCYEVERLDNGTWVKMDQHRGFLHNQPRRHAELLFLDLVPSLQLDPAQIYRVTWFISWSPCFSWGCACEVRAFLQENTHVRLRIFAARIADHWPLYKEALQMLRDAGAQVSIMTYDEFKHCWDTFVDHQGAPFQPWDGLDEHSQALSRRLRAILQNQGN

SEQ ID NO: 1065 - protein, 192 aa, synthetic construct
MEASPASGPRHLMDPHTFYSNFNNKRIGRHKTYLCYEVERLDNGTWVKMDQHRGFLHNQPRRHAELLFLDLVPSLQLDPAQIYRVTWFISWSPCFSWGCACEVRAFLQENTHVRLRIFAARIADHWPLYKEALQMLRDAGAQVSIMTYDEFKHCWDTFVDHQGAPFQPWDGLDEHSQALSRRLRAILQNQGN

SEQ ID NO: 1066 - skipped

SEQ ID NO: 1067 - protein, 192 aa, synthetic construct
MEASPASGPRHLMDPHTFYSNFNNKTIGRHKTYLCYEVERLDNGTWVKMDQHRGFLHNQPRRHAELLFLDLVPSLQLDPAQIYRVTWFISWSPCFSWGCACEVRAFLQENTHVRLRIFAARIADHWPLYKEALQMLRDAGAQVSIMTYDEFKHCWDTFVDHQGAPFQPWDGLDEHSQALSRRLRAILQNQGN

SEQ ID NO: 1068 - skipped

SEQ ID NO: 1069 - protein, 192 aa, synthetic construct
MEASPASGPRHLMDPHTFYSNFNNKWIGRHKTYLCYEVERLDNGTWVKMDQHRGFLHNQPRRHAELLFLDLVPSLQLDPAQIYRVTWFISWSPCFSWGCACEVRAFLQENTHVRLRIFAARIADHWPLYKEALQMLRDAGAQVSIMTYDEFKHCWDTFVDHQGAPFQPWDGLDEHSQALSRRLRAILQNQGN

SEQ ID NO: 1070 - protein, 192 aa, synthetic construct
MEASPASGPRHLMDPHTFYSNFNNKYIGRHKTYLCYEVERLDNGTWVKMDQHRGFLHNQPRRHAELLFLDLVPSLQLDPAQIYRVTWFISWSPCFSWGCACEVRAFLQENTHVRLRIFAARIADHWPLYKEALQMLRDAGAQVSIMTYDEFKHCWDTFVDHQGAPFQPWDGLDEHSQALSRRLRAILQNQGN

SEQ ID NO: 1071 - skipped

SEQ ID NO: 1072 - protein, 192 aa, synthetic construct
MEASPASGPRHLMDPHTFYSNFNNKIGRCHKTYLCYEVERLDNGTWVKMDQHRGFLHNQPRRHAELLFLDLVPSLQLDPAQIYRVTWFISWSPCFSWGCACEVRAFLQENTHVRLRIFAARIADHWPLYKEALQMLRDAGAQVSIMTYDEFKHCWDTFVDHQGAPFQPWDGLDEHSQALSRRLRAILQNQGN

SEQ ID NO: 1073 - protein, 192 aa, synthetic construct
MEASPASGPRHLMDPHTFYSNFNNKIGRDHKTYLCYEVERLDNGTWVKMDQHRGFLHNQPRRHAELLFLDLVPSLQLDPAQIYRVTWFISWSPCFSWGCACEVRAFLQENTHVRLRIFAARIADHWPLYKEALQMLRDAGAQVSIMTYDEFKHCWDTFVDHQGAPFQPWDGLDEHSQALSRRLRAILQNQGN

SEQ ID NO: 1074 - protein, 192 aa, synthetic construct
MEASPASGPRHLMDPHTFYSNFNNKIGREHKTYLCYEVERLDNGTWVKMDQHRGFLHNQPRRHAELLFLDLVPSLQLDPAQIYRVTWFISWSPCFSWGCACEVRAFLQENTHVRLRIFAARIADHWPLYKEALQMLRDAGAQVSIMTYDEFKHCWDTFVDHQGAPFQPWDGLDEHSQALSRRLRAILQNQGN

SEQ ID NO: 1075 - protein, 192 aa, synthetic construct
MEASPASGPRHLMDPHTFYSNFNNKIGRFHKTYLCYEVERLDNGTWVKMDQHRGFLHNQPRRHAELLFLDLVPSLQLDPAQIYRVTWFISWSPCFSWGCACEVRAFLQENTHVRLRIFAARIADHWPLYKEALQMLRDAGAQVSIMTYDEFKHCWDTFVDHQGAPFQPWDGLDEHSQALSRRLRAILQNQGN

SEQ ID NO: 1076 - protein, 192 aa, synthetic construct
MEASPASGPRHLMDPHTFYSNFNNKIGRGHKTYLCYEVERLDNGTWVKMDQHRGFLHNQPRRHAELLFLDLVPSLQLDPAQIYRVTWFISWSPCFSWGCACEVRAFLQENTHVRLRIFAARIADHWPLYKEALQMLRDAGAQVSIMTYDEFKHCWDTFVDHQGAPFQPWDGLDEHSQALSRRLRAILQNQGN

SEQ ID NO: 1077 - protein, 192 aa, synthetic construct
MEASPASGPRHLMDPHTFYSNFNNKIGRHHKTYLCYEVERLDNGTWVKMDQHRGFLHNQPRRHAELLFLDLVPSLQLDPAQIYRVTWFISWSPCFSWGCACEVRAFLQENTHVRLRIFAARIADHWPLYKEALQMLRDAGAQVSIMTYDEFKHCWDTFVDHQGAPFQPWDGLDEHSQALSRRLRAILQNQGN

SEQ ID NO: 1078 - protein, 192 aa, synthetic construct
MEASPASGPRHLMDPHTFYSNFNNKIGRIHKTYLCYEVERLDNGTWVKMDQHRGFLHNQPRRHAELLFLDLVPSLQLDPAQIYRVTWFISWSPCFSWGCACEVRAFLQENTHVRLRIFAARIADHWPLYKEALQMLRDAGAQVSIMTYDEFKHCWDTFVDHQGAPFQPWDGLDEHSQALSRRLRAILQNQGN

SEQ ID NO: 1079 - protein, 192 aa, synthetic construct
MEASPASGPRHLMDPHTFYSNFNNKIGRKHKTYLCYEVERLDNGTWVKMDQHRGFLHNQPRRHAELLFLDLVPSLQLDPAQIYRVTWFISWSPCFSWGCACEVRAFLQENTHVRLRIFAARIADHWPLYKEALQMLRDAGAQVSIMTYDEFKHCWDTFVDHQGAPFQPWDGLDEHSQALSRRLRAILQNQGN

SEQ ID NO: 1080 - protein, 192 aa, synthetic construct
MEASPASGPRHLMDPHTFYSNFNNKIGRLHKTYLCYEVERLDNGTWVKMDQHRGFLHNQPRRHAELLFLDLVPSLQLDPAQIYRVTWFISWSPCFSWGCACEVRAFLQENTHVRLRIFAARIADHWPLYKEALQMLRDAGAQVSIMTYDEFKHCWDTFVDHQGAPFQPWDGLDEHSQALSRRLRAILQNQGN

SEQ ID NO: 1081 - protein, 192 aa, synthetic construct
MEASPASGPRHLMDPHTFYSNFNNKIGRMHKTYLCYEVERLDNGTWVKMDQHRGFLHNQPRRHAELLFLDLVPSLQLDPAQIYRVTWFISWSPCFSWGCACEVRAFLQENTHVRLRIFAARIADHWPLYKEALQMLRDAGAQVSIMTYDEFKHCWDTFVDHQGAPFQPWDGLDEHSQALSRRLRAILQNQGN

SEQ ID NO: 1082 - protein, 192 aa, synthetic construct
MEASPASGPRHLMDPHTFYSNFNNKIGRNHKTYLCYEVERLDNGTWVKMDQHRGFLHNQPRRHAELLFLDLVPSLQLDPAQIYRVTWFISWSPCFSWGCACEVRAFLQENTHVRLRIFAARIADHWPLYKEALQMLRDAGAQVSIMTYDEFKHCWDTFVDHQGAPFQPWDGLDEHSQALSRRLRAILQNQGN

SEQ ID NO: 1083 - protein, 192 aa, synthetic construct
MEASPASGPRHLMDPHTFYSNFNNKIGRPHKTYLCYEVERLDNGTWVKMDQHRGFLHNQPRRHAELLFLDLVPSLQLDPAQIYRVTWFISWSPCFSWGCACEVRAFLQENTHVRLRIFAARIADHWPLYKEALQMLRDAGAQVSIMTYDEFKHCWDTFVDHQGAPFQPWDGLDEHSQALSRRLRAILQNQGN

SEQ ID NO: 1084 - protein, 192 aa, synthetic construct
MEASPASGPRHLMDPHTFYSNFNNKIGRQHKTYLCYEVERLDNGTWVKMDQHRGFLHNQPRRHAELLFLDLVPSLQLDPAQIYRVTWFISWSPCFSWGCACEVRAFLQENTHVRLRIFAARIADHWPLYKEALQMLRDAGAQVSIMTYDEFKHCWDTFVDHQGAPFQPWDGLDEHSQALSRRLRAILQNQGN

SEQ ID NO: 1085 - protein, 192 aa, synthetic construct
MEASPASGPRHLMDPHTFYSNFNNKIGRRHKTYLCYEVERLDNGTWVKMDQHRGFLHNQPRRHAELLFLDLVPSLQLDPAQIYRVTWFISWSPCFSWGCACEVRAFLQENTHVRLRIFAARIADHWPLYKEALQMLRDAGAQVSIMTYDEFKHCWDTFVDHQGAPFQPWDGLDEHSQALSRRLRAILQNQGN

SEQ ID NO: 1086 - protein, 192 aa, synthetic construct
MEASPASGPRHLMDPHTFYSNFNNKIGRSHKTYLCYEVERLDNGTWVKMDQHRGFLHNQPRRHAELLFLDLVPSLQLDPAQIYRVTWFISWSPCFSWGCACEVRAFLQENTHVRLRIFAARIADHWPLYKEALQMLRDAGAQVSIMTYDEFKHCWDTFVDHQGAPFQPWDGLDEHSQALSRRLRAILQNQGN

SEQ ID NO: 1087 - protein, 192 aa, synthetic construct
MEASPASGPRHLMDPHTFYSNFNNKIGRTHKTYLCYEVERLDNGTWVKMDQHRGFLHNQPRRHAELLFLDLVPSLQLDPAQIYRVTWFISWSPCFSWGCACEVRAFLQENTHVRLRIFAARIADHWPLYKEALQMLRDAGAQVSIMTYDEFKHCWDTFVDHQGAPFQPWDGLDEHSQALSRRLRAILQNQGN

SEQ ID NO: 1088 - protein, 192 aa, synthetic construct
MEASPASGPRHLMDPHTFYSNFNNKIGRVHKTYLCYEVERLDNGTWVKMDQHRGFLHNQPRRHAELLFLDLVPSLQLDPAQIYRVTWFISWSPCFSWGCACEVRAFLQENTHVRLRIFAARIADHWPLYKEALQMLRDAGAQVSIMTYDEFKHCWDTFVDHQGAPFQPWDGLDEHSQALSRRLRAILQNQGN

SEQ ID NO: 1089 - protein, 192 aa, synthetic construct
MEASPASGPRHLMDPHTFYSNFNNKIGRWHKTYLCYEVERLDNGTWVKMDQHRGFLHNQPRRHAELLFLDLVPSLQLDPAQIYRVTWFISWSPCFSWGCACEVRAFLQENTHVRLRIFAARIADHWPLYKEALQMLRDAGAQVSIMTYDEFKHCWDTFVDHQGAPFQPWDGLDEHSQALSRRLRAILQNQGN

SEQ ID NO: 1090 - protein, 192 aa, synthetic construct
MEASPASGPRHLMDPHTFYSNFNNKIGRYHKTYLCYEVERLDNGTWVKMDQHRGFLHNQPRRHAELLFLDLVPSLQLDPAQIYRVTWFISWSPCFSWGCACEVRAFLQENTHVRLRIFAARIADHWPLYKEALQMLRDAGAQVSIMTYDEFKHCWDTFVDHQGAPFQPWDGLDEHSQALSRRLRAILQNQGN

SEQ ID NO: 1091 - skipped

SEQ ID NO: 1092 - protein, 192 aa, synthetic construct
MEASPASGPRHLMDPHTFYSNFNNKIGRHKTYLCYEVERLDNGTWVKMDQHRGFLHNQPRRHAELLFLDLVPSLQLDPAQIYRVTWFISWSPCFSCWGCACEVRAFLQENTHVRLRIFAARIADHWPLYKEALQMLRDAGAQVSIMTYDEFKHCWDTFVDHQGAPFQPWDGLDEHSQALSRRLRAILQNQGN

SEQ ID NO: 1093 - protein, 192 aa, synthetic construct
MEASPASGPRHLMDPHTFYSNFNNKIGRHKTYLCYEVERLDNGTWVKMDQHRGFLHNQPRRHAELLFLDLVPSLQLDPAQIYRVTWFISWSPCFSDWGCACEVRAFLQENTHVRLRIFAARIADHWPLYKEALQMLRDAGAQVSIMTYDEFKHCWDTFVDHQGAPFQPWDGLDEHSQALSRRLRAILQNQGN

SEQ ID NO: 1094 - protein, 192 aa, synthetic construct
MEASPASGPRHLMDPHTFYSNFNNKIGRHKTYLCYEVERLDNGTWVKMDQHRGFLHNQPRRHAELLFLDLVPSLQLDPAQIYRVTWFISWSPCFSEWGCACEVRAFLQENTHVRLRIFAARIADHWPLYKEALQMLRDAGAQVSIMTYDEFKHCWDTFVDHQGAPFQPWDGLDEHSQALSRRLRAILQNQGN

SEQ ID NO: 1095 - protein, 192 aa, synthetic construct
MEASPASGPRHLMDPHTFYSNFNNKIGRHKTYLCYEVERLDNGTWVKMDQHRGFLHNQPRRHAELLFLDLVPSLQLDPAQIYRVTWFISWSPCFSFWGCACEVRAFLQENTHVRLRIFAARIADHWPLYKEALQMLRDAGAQVSIMTYDEFKHCWDTFVDHQGAPFQPWDGLDEHSQALSRRLRAILQNQGN

SEQ ID NO: 1096 - protein, 192 aa, synthetic construct
MEASPASGPRHLMDPHTFYSNFNNKIGRHKTYLCYEVERLDNGTWVKMDQHRGFLHNQPRRHAELLFLDLVPSLQLDPAQIYRVTWFISWSPCFSGWGCACEVRAFLQENTHVRLRIFAARIADHWPLYKEALQMLRDAGAQVSIMTYDEFKHCWDTFVDHQGAPFQPWDGLDEHSQALSRRLRAILQNQGN

SEQ ID NO: 1097 - protein, 192 aa, synthetic construct
MEASPASGPRHLMDPHTFYSNFNNKIGRHKTYLCYEVERLDNGTWVKMDQHRGFLHNQPRRHAELLFLDLVPSLQLDPAQIYRVTWFISWSPCFSHWGCACEVRAFLQENTHVRLRIFAARIADHWPLYKEALQMLRDAGAQVSIMTYDEFKHCWDTFVDHQGAPFQPWDGLDEHSQALSRRLRAILQNQGN

SEQ ID NO: 1098 - protein, 192 aa, synthetic construct
MEASPASGPRHLMDPHTFYSNFNNKIGRHKTYLCYEVERLDNGTWVKMDQHRGFLHNQPRRHAELLFLDLVPSLQLDPAQIYRVTWFISWSPCFSIWGCACEVRAFLQENTHVRLRIFAARIADHWPLYKEALQMLRDAGAQVSIMTYDEFKHCWDTFVDHQGAPFQPWDGLDEHSQALSRRLRAILQNQGN

SEQ ID NO: 1099 - protein, 192 aa, synthetic construct
MEASPASGPRHLMDPHTFYSNFNNKIGRHKTYLCYEVERLDNGTWVKMDQHRGFLHNQPRRHAELLFLDLVPSLQLDPAQIYRVTWFISWSPCFSKWGCACEVRAFLQENTHVRLRIFAARIADHWPLYKEALQMLRDAGAQVSIMTYDEFKHCWDTFVDHQGAPFQPWDGLDEHSQALSRRLRAILQNQGN

SEQ ID NO: 1100 - protein, 192 aa, synthetic construct
MEASPASGPRHLMDPHTFYSNFNNKIGRHKTYLCYEVERLDNGTWVKMDQHRGFLHNQPRRHAELLFLDLVPSLQLDPAQIYRVTWFISWSPCFSLWGCACEVRAFLQENTHVRLRIFAARIADHWPLYKEALQMLRDAGAQVSIMTYDEFKHCWDTFVDHQGAPFQPWDGLDEHSQALSRRLRAILQNQGN

SEQ ID NO: 1101 - protein, 192 aa, synthetic construct
MEASPASGPRHLMDPHTFYSNFNNKIGRHKTYLCYEVERLDNGTWVKMDQHRGFLHNQPRRHAELLFLDLVPSLQLDPAQIYRVTWFISWSPCFSMWGCACEVRAFLQENTHVRLRIFAARIADHWPLYKEALQMLRDAGAQVSIMTYDEFKHCWDTFVDHQGAPFQPWDGLDEHSQALSRRLRAILQNQGN

SEQ ID NO: 1102 - protein, 192 aa, synthetic construct
MEASPASGPRHLMDPHTFYSNFNNKIGRHKTYLCYEVERLDNGTWVKMDQHRGFLHNQPRRHAELLFLDLVPSLQLDPAQIYRVTWFISWSPCFSNWGCACEVRAFLQENTHVRLRIFAARIADHWPLYKEALQMLRDAGAQVSIMTYDEFKHCWDTFVDHQGAPFQPWDGLDEHSQALSRRLRAILQNQGN

SEQ ID NO: 1103 - protein, 192 aa, synthetic construct
MEASPASGPRHLMDPHTFYSNFNNKIGRHKTYLCYEVERLDNGTWVKMDQHRGFLHNQPRRHAELLFLDLVPSLQLDPAQIYRVTWFISWSPCFSPWGCACEVRAFLQENTHVRLRIFAARIADHWPLYKEALQMLRDAGAQVSIMTYDEFKHCWDTFVDHQGAPFQPWDGLDEHSQALSRRLRAILQNQGN

SEQ ID NO: 1104 - protein, 192 aa, synthetic construct
MEASPASGPRHLMDPHTFYSNFNNKIGRHKTYLCYEVERLDNGTWVKMDQHRGFLHNQPRRHAELLFLDLVPSLQLDPAQIYRVTWFISWSPCFSQWGCACEVRAFLQENTHVRLRIFAARIADHWPLYKEALQMLRDAGAQVSIMTYDEFKHCWDTFVDHQGAPFQPWDGLDEHSQALSRRLRAILQNQGN

SEQ ID NO: 1105 - protein, 192 aa, synthetic construct
MEASPASGPRHLMDPHTFYSNFNNKIGRHKTYLCYEVERLDNGTWVKMDQHRGFLHNQPRRHAELLFLDLVPSLQLDPAQIYRVTWFISWSPCFSRWGCACEVRAFLQENTHVRLRIFAARIADHWPLYKEALQMLRDAGAQVSIMTYDEFKHCWDTFVDHQGAPFQPWDGLDEHSQALSRRLRAILQNQGN

SEQ ID NO: 1106 - protein, 192 aa, synthetic construct
MEASPASGPRHLMDPHTFYSNFNNKIGRHKTYLCYEVERLDNGTWVKMDQHRGFLHNQPRRHAELLFLDLVPSLQLDPAQIYRVTWFISWSPCFSSWGCACEVRAFLQENTHVRLRIFAARIADHWPLYKEALQMLRDAGAQVSIMTYDEFKHCWDTFVDHQGAPFQPWDGLDEHSQALSRRLRAILQNQGN

SEQ ID NO: 1107 - protein, 192 aa, synthetic construct
MEASPASGPRHLMDPHTFYSNFNNKIGRHKTYLCYEVERLDNGTWVKMDQHRGFLHNQPRRHAELLFLDLVPSLQLDPAQIYRVTWFISWSPCFSTWGCACEVRAFLQENTHVRLRIFAARIADHWPLYKEALQMLRDAGAQVSIMTYDEFKHCWDTFVDHQGAPFQPWDGLDEHSQALSRRLRAILQNQGN

SEQ ID NO: 1108 - protein, 192 aa, synthetic construct
MEASPASGPRHLMDPHTFYSNFNNKIGRHKTYLCYEVERLDNGTWVKMDQHRGFLHNQPRRHAELLFLDLVPSLQLDPAQIYRVTWFISWSPCFSVWGCACEVRAFLQENTHVRLRIFAARIADHWPLYKEALQMLRDAGAQVSIMTYDEFKHCWDTFVDHQGAPFQPWDGLDEHSQALSRRLRAILQNQGN

SEQ ID NO: 1109 - protein, 192 aa, synthetic construct
MEASPASGPRHLMDPHTFYSNFNNKIGRHKTYLCYEVERLDNGTWVKMDQHRGFLHNQPRRHAELLFLDLVPSLQLDPAQIYRVTWFISWSPCFSWWGCACEVRAFLQENTHVRLRIFAARIADHWPLYKEALQMLRDAGAQVSIMTYDEFKHCWDTFVDHQGAPFQPWDGLDEHSQALSRRLRAILQNQGN

SEQ ID NO: 1110 - protein, 192 aa, synthetic construct
MEASPASGPRHLMDPHTFYSNFNNKIGRHKTYLCYEVERLDNGTWVKMDQHRGFLHNQPRRHAELLFLDLVPSLQLDPAQIYRVTWFISWSPCFSYWGCACEVRAFLQENTHVRLRIFAARIADHWPLYKEALQMLRDAGAQVSIMTYDEFKHCWDTFVDHQGAPFQPWDGLDEHSQALSRRLRAILQNQGN

SEQ ID NO: 1111 - skipped

SEQ ID NO: 1112 - protein, 192 aa, synthetic construct
MEASPASGPRHLMDPHTFYSNFNNKIGRHKTYLCYEVERLDNGTWVKMDQHRGFLHNQPRRHAELLFLDLVPSLQLDPAQIYRVTWFISWSPCFSWCGCACEVRAFLQENTHVRLRIFAARIADHWPLYKEALQMLRDAGAQVSIMTYDEFKHCWDTFVDHQGAPFQPWDGLDEHSQALSRRLRAILQNQGN

SEQ ID NO: 1113 - protein, 192 aa, synthetic construct
MEASPASGPRHLMDPHTFYSNFNNKIGRHKTYLCYEVERLDNGTWVKMDQHRGFLHNQPRRHAELLFLDLVPSLQLDPAQIYRVTWFISWSPCFSWDGCACEVRAFLQENTHVRLRIFAARIADHWPLYKEALQMLRDAGAQVSIMTYDEFKHCWDTFVDHQGAPFQPWDGLDEHSQALSRRLRAILQNQGN

SEQ ID NO: 1114 - protein, 192 aa, synthetic construct
MEASPASGPRHLMDPHTFYSNFNNKIGRHKTYLCYEVERLDNGTWVKMDQHRGFLHNQPRRHAELLFLDLVPSLQLDPAQIYRVTWFISWSPCFSWEGCACEVRAFLQENTHVRLRIFAARIADHWPLYKEALQMLRDAGAQVSIMTYDEFKHCWDTFVDHQGAPFQPWDGLDEHSQALSRRLRAILQNQGN

SEQ ID NO: 1115 - protein, 192 aa, synthetic construct
MEASPASGPRHLMDPHTFYSNFNNKIGRHKTYLCYEVERLDNGTWVKMDQHRGFLHNQPRRHAELLFLDLVPSLQLDPAQIYRVTWFISWSPCFSWFGCACEVRAFLQENTHVRLRIFAARIADHWPLYKEALQMLRDAGAQVSIMTYDEFKHCWDTFVDHQGAPFQPWDGLDEHSQALSRRLRAILQNQGN

SEQ ID NO: 1116 - protein, 192 aa, synthetic construct
MEASPASGPRHLMDPHTFYSNFNNKIGRHKTYLCYEVERLDNGTWVKMDQHRGFLHNQPRRHAELLFLDLVPSLQLDPAQIYRVTWFISWSPCFSWGGCACEVRAFLQENTHVRLRIFAARIADHWPLYKEALQMLRDAGAQVSIMTYDEFKHCWDTFVDHQGAPFQPWDGLDEHSQALSRRLRAILQNQGN

SEQ ID NO: 1117 - protein, 192 aa, synthetic construct
MEASPASGPRHLMDPHTFYSNFNNKIGRHKTYLCYEVERLDNGTWVKMDQHRGFLHNQPRRHAELLFLDLVPSLQLDPAQIYRVTWFISWSPCFSWHGCACEVRAFLQENTHVRLRIFAARIADHWPLYKEALQMLRDAGAQVSIMTYDEFKHCWDTFVDHQGAPFQPWDGLDEHSQALSRRLRAILQNQGN

SEQ ID NO: 1118 - protein, 192 aa, synthetic construct
MEASPASGPRHLMDPHTFYSNFNNKIGRHKTYLCYEVERLDNGTWVKMDQHRGFLHNQPRRHAELLFLDLVPSLQLDPAQIYRVTWFISWSPCFSWIGCACEVRAFLQENTHVRLRIFAARIADHWPLYKEALQMLRDAGAQVSIMTYDEFKHCWDTFVDHQGAPFQPWDGLDEHSQALSRRLRAILQNQGN

SEQ ID NO: 1119 - protein, 192 aa, synthetic construct
MEASPASGPRHLMDPHTFYSNFNNKIGRHKTYLCYEVERLDNGTWVKMDQHRGFLHNQPRRHAELLFLDLVPSLQLDPAQIYRVTWFISWSPCFSWKGCACEVRAFLQENTHVRLRIFAARIADHWPLYKEALQMLRDAGAQVSIMTYDEFKHCWDTFVDHQGAPFQPWDGLDEHSQALSRRLRAILQNQGN

SEQ ID NO: 1120 - protein, 192 aa, synthetic construct
MEASPASGPRHLMDPHTFYSNFNNKIGRHKTYLCYEVERLDNGTWVKMDQHRGFLHNQPRRHAELLFLDLVPSLQLDPAQIYRVTWFISWSPCFSWLGCACEVRAFLQENTHVRLRIFAARIADHWPLYKEALQMLRDAGAQVSIMTYDEFKHCWDTFVDHQGAPFQPWDGLDEHSQALSRRLRAILQNQGN

SEQ ID NO: 1121 - protein, 192 aa, synthetic construct
MEASPASGPRHLMDPHTFYSNFNNKIGRHKTYLCYEVERLDNGTWVKMDQHRGFLHNQPRRHAELLFLDLVPSLQLDPAQIYRVTWFISWSPCFSWMGCACEVRAFLQENTHVRLRIFAARIADHWPLYKEALQMLRDAGAQVSIMTYDEFKHCWDTFVDHQGAPFQPWDGLDEHSQALSRRLRAILQNQGN

SEQ ID NO: 1122 - protein, 192 aa, synthetic construct
MEASPASGPRHLMDPHTFYSNFNNKIGRHKTYLCYEVERLDNGTWVKMDQHRGFLHNQPRRHAELLFLDLVPSLQLDPAQIYRVTWFISWSPCFSWNGCACEVRAFLQENTHVRLRIFAARIADHWPLYKEALQMLRDAGAQVSIMTYDEFKHCWDTFVDHQGAPFQPWDGLDEHSQALSRRLRAILQNQGN

SEQ ID NO: 1123 - protein, 192 aa, synthetic construct
MEASPASGPRHLMDPHTFYSNFNNKIGRHKTYLCYEVERLDNGTWVKMDQHRGFLHNQPRRHAELLFLDLVPSLQLDPAQIYRVTWFISWSPCFSWPGCACEVRAFLQENTHVRLRIFAARIADHWPLYKEALQMLRDAGAQVSIMTYDEFKHCWDTFVDHQGAPFQPWDGLDEHSQALSRRLRAILQNQGN

SEQ ID NO: 1124 - protein, 192 aa, synthetic construct
MEASPASGPRHLMDPHTFYSNFNNKIGRHKTYLCYEVERLDNGTWVKMDQHRGFLHNQPRRHAELLFLDLVPSLQLDPAQIYRVTWFISWSPCFSWQGCACEVRAFLQENTHVRLRIFAARIADHWPLYKEALQMLRDAGAQVSIMTYDEFKHCWDTFVDHQGAPFQPWDGLDEHSQALSRRLRAILQNQGN

SEQ ID NO: 1125 - protein, 192 aa, synthetic construct
MEASPASGPRHLMDPHTFYSNFNNKIGRHKTYLCYEVERLDNGTWVKMDQHRGFLHNQPRRHAELLFLDLVPSLQLDPAQIYRVTWFISWSPCFSWRGCACEVRAFLQENTHVRLRIFAARIADHWPLYKEALQMLRDAGAQVSIMTYDEFKHCWDTFVDHQGAPFQPWDGLDEHSQALSRRLRAILQNQGN

SEQ ID NO: 1126 - protein, 192 aa, synthetic construct
MEASPASGPRHLMDPHTFYSNFNNKIGRHKTYLCYEVERLDNGTWVKMDQHRGFLHNQPRRHAELLFLDLVPSLQLDPAQIYRVTWFISWSPCFSWSGCACEVRAFLQENTHVRLRIFAARIADHWPLYKEALQMLRDAGAQVSIMTYDEFKHCWDTFVDHQGAPFQPWDGLDEHSQALSRRLRAILQNQGN

SEQ ID NO: 1127 - protein, 192 aa, synthetic construct
MEASPASGPRHLMDPHTFYSNFNNKIGRHKTYLCYEVERLDNGTWVKMDQHRGFLHNQPRRHAELLFLDLVPSLQLDPAQIYRVTWFISWSPCFSWTGCACEVRAFLQENTHVRLRIFAARIADHWPLYKEALQMLRDAGAQVSIMTYDEFKHCWDTFVDHQGAPFQPWDGLDEHSQALSRRLRAILQNQGN

SEQ ID NO: 1128 - protein, 192 aa, synthetic construct
MEASPASGPRHLMDPHTFYSNFNNKIGRHKTYLCYEVERLDNGTWVKMDQHRGFLHNQPRRHAELLFLDLVPSLQLDPAQIYRVTWFISWSPCFSWVGCACEVRAFLQENTHVRLRIFAARIADHWPLYKEALQMLRDAGAQVSIMTYDEFKHCWDTFVDHQGAPFQPWDGLDEHSQALSRRLRAILQNQGN

SEQ ID NO: 1129 - protein, 192 aa, synthetic construct
MEASPASGPRHLMDPHTFYSNFNNKIGRHKTYLCYEVERLDNGTWVKMDQHRGFLHNQPRRHAELLFLDLVPSLQLDPAQIYRVTWFISWSPCFSWGWCACEVRAFLQENTHVRLRIFAARIADHWPLYKEALQMLRDAGAQVSIMTYDEFKHCWDTFVDHQGAPFQPWDGLDEHSQALSRRLRAILQNQGN

SEQ ID NO: 1130 - protein, 192 aa, synthetic construct
MEASPASGPRHLMDPHTFYSNFNNKIGRHKTYLCYEVERLDNGTWVKMDQHRGFLHNQPRRHAELLFLDLVPSLQLDPAQIYRVTWFISWSPCFSWYGCACEVRAFLQENTHVRLRIFAARIADHWPLYKEALQMLRDAGAQVSIMTYDEFKHCWDTFVDHQGAPFQPWDGLDEHSQALSRRLRAILQNQGN

SEQ ID NO: 1131 - protein, 191 aa, synthetic construct
MEASPASGPRHLMDPHTFYSNFNNKIGRHKTYLCYEVERLDNGTWVKMDQHRGFLHNQPRRHAELLFLDLVPSLQLDPAQIYRVTWFISWSPDFSCGCACEVRAFLQENTHVRLRIFAARIADHWPLYKEALQMLRDAGAQVSIMTYDEFKHCWDTFVDHQGAPFQPWDGLDEHSQALSRRLRAILQNQGN

SEQ ID NO: 1132 - protein, 191 aa, synthetic construct
MEASPASGPRHLMDPHTFYSNFNNKIGRHKTYLCYEVERLDNGTWVKMDQHRGFLHNQPRRHAELLFLDLVPSLQLDPAQIYRVTWFISWSPNFSCGCACEVRAFLQENTHVRLRIFAARIADHWPLYKEALQMLRDAGAQVSIMTYDEFKHCWDTFVDHQGAPFQPWDGLDEHSQALSRRLRAILQNQGN

SEQ ID NO: 1133 - protein, 191 aa, synthetic construct
MEASPASGPRHLMDPHTFYSNFNNKIGRHKTYLCYEVERLDNGTWVKMDQHRGFLHNQPRRHAELLFLDLVPSLQLDPAQIYRVTWFISWSPYFSCGCACEVRAFLQENTHVRLRIFAARIADHWPLYKEALQMLRDAGAQVSIMTYDEFKHCWDTFVDHQGAPFQPWDGLDEHSQALSRRLRAILQNQGN

SEQ ID NO: 1134 - protein, 191 aa, synthetic construct
MEASPASGPRHLMDPHTFYSNFNNKIGRHKTYLCYEVERLDNGTWVKMDQHRGFLHNQPRRHAELLFLDLVPSLQLDPAQIYRVTWFISWSPWFSCGCACEVRAFLQENTHVRLRIFAARIADHWPLYKEALQMLRDAGAQVSIMTYDEFKHCWDTFVDHQGAPFQPWDGLDEHSQALSRRLRAILQNQGN

SEQ ID NO: 1135 - protein, 191 aa, synthetic construct
MEASPASGPRHLMDPHTFYSNFNNKIGRHKTYLCYEVERLDNGTWVKMDQHRGFLHNQPRRHAELLFLDLVPSLQLDPAQIYRVTWFISWSPDFSHGCACEVRAFLQENTHVRLRIFAARIADHWPLYKEALQMLRDAGAQVSIMTYDEFKHCWDTFVDHQGAPFQPWDGLDEHSQALSRRLRAILQNQGN

SEQ ID NO: 1136 - protein, 191 aa, synthetic construct
MEASPASGPRHLMDPHTFYSNFNNKIGRHKTYLCYEVERLDNGTWVKMDQHRGFLHNQPRRHAELLFLDLVPSLQLDPAQIYRVTWFISWSPNFSHGCACEVRAFLQENTHVRLRIFAARIADHWPLYKEALQMLRDAGAQVSIMTYDEFKHCWDTFVDHQGAPFQPWDGLDEHSQALSRRLRAILQNQGN

SEQ ID NO: 1137 - protein, 191 aa, synthetic construct
MEASPASGPRHLMDPHTFYSNFNNKIGRHKTYLCYEVERLDNGTWVKMDQHRGFLHNQPRRHAELLFLDLVPSLQLDPAQIYRVTWFISWSPYFSHGCACEVRAFLQENTHVRLRIFAARIADHWPLYKEALQMLRDAGAQVSIMTYDEFKHCWDTFVDHQGAPFQPWDGLDEHSQALSRRLRAILQNQGN

SEQ ID NO: 1138 - protein, 191 aa, synthetic construct
MEASPASGPRHLMDPHTFYSNFNNKIGRHKTYLCYEVERLDNGTWVKMDQHRGFLHNQPRRHAELLFLDLVPSLQLDPAQIYRVTWFISWSPWFSHGCACEVRAFLQENTHVRLRIFAARIADHWPLYKEALQMLRDAGAQVSIMTYDEFKHCWDTFVDHQGAPFQPWDGLDEHSQALSRRLRAILQNQGN

SEQ ID NO: 1139 - protein, 191 aa, synthetic construct
MEASPASGPRHLMDPHTFYSNFNNKIGRHKTYLCYEVERLDNGTWVKMDQHRGFLHNQPRRHAELLFLDLVPSLQLDPAQIYRVTWFISWSPDFSDGCACEVRAFLQENTHVRLRIFAARIADHWPLYKEALQMLRDAGAQVSIMTYDEFKHCWDTFVDHQGAPFQPWDGLDEHSQALSRRLRAILQNQGN

SEQ ID NO: 1140 - protein, 191 aa, synthetic construct
MEASPASGPRHLMDPHTFYSNFNNKIGRHKTYLCYEVERLDNGTWVKMDQHRGFLHNQPRRHAELLFLDLVPSLQLDPAQIYRVTWFISWSPNFSDGCACEVRAFLQENTHVRLRIFAARIADHWPLYKEALQMLRDAGAQVSIMTYDEFKHCWDTFVDHQGAPFQPWDGLDEHSQALSRRLRAILQNQGN

SEQ ID NO: 1141 - protein, 191 aa, synthetic construct
MEASPASGPRHLMDPHTFYSNFNNKIGRHKTYLCYEVERLDNGTWVKMDQHRGFLHNQPRRHAELLFLDLVPSLQLDPAQIYRVTWFISWSPYFSDGCACEVRAFLQENTHVRLRIFAARIADHWPLYKEALQMLRDAGAQVSIMTYDEFKHCWDTFVDHQGAPFQPWDGLDEHSQALSRRLRAILQNQGN

SEQ ID NO: 1142 - protein, 191 aa, synthetic construct
MEASPASGPRHLMDPHTFYSNFNNKIGRHKTYLCYEVERLDNGTWVKMDQHRGFLHNQPRRHAELLFLDLVPSLQLDPAQIYRVTWFISWSPWFSDGCACEVRAFLQENTHVRLRIFAARIADHWPLYKEALQMLRDAGAQVSIMTYDEFKHCWDTFVDHQGAPFQPWDGLDEHSQALSRRLRAILQNQGN

SEQ ID NO: 1143 - protein, 191 aa, synthetic construct
MEASPASGPRHLMDPHTFYSNFNNKIGRHKTYLCYEVERLDNGTWVKMDQHRGFLHNQPRRHAELLFLDLVPSLQLDPAQIYRVTWFISWSPYFSCGCACEVRAFLQENTHVRLRIFAARIADHDPLYKEALQMLRDAGAQVSIMTYDEFKHCWDTFVDHQGAPFQPWDGLDEHSQALSRRLRAILQNQGN

SEQ ID NO: 1144 - protein, 191 aa, synthetic construct
MEASPASGPRHLMDPHTFYSNFNNKIGRHKTYLCYEVERLDNGTWVKMDQHRGFLHNQPRRHAELLFLDLVPSLQLDPAQIYRVTWFISWSPWFSCGCACEVRAFLQENTHVRLRIFAARIADHDPLYKEALQMLRDAGAQVSIMTYDEFKHCWDTFVDHQGAPFQPWDGLDEHSQALSRRLRAILQNQGN

SEQ ID NO: 1145 - protein, 189 aa, synthetic construct; identical to SEQ ID NO: 95

SEQ ID NO: 1146 - protein, 191 aa, synthetic construct
MEASPASGPRHLMDPHTFYSNFNNKIGRHKTYLCYEVERLDNGTWVKMDQHRGFLHNQPRRHAELLFLDLVPSLQLDPAQIYRVTWFISWSPCFSWGCVCEVRAFLQENTHVRLRIFAARIADHWPLYKEALQMLRDAGAQVSIMTYDEFKHCWDTFVDHQGAPFQPWDGLDEHSQALSRRLRAILQNQGN

SEQ ID NO: 1147 - protein, 191 aa, synthetic construct
MEASPASGPRHLMDPHTFYSNFNNKIGRHKTYLCYEVERLDNGTWVKMDQHRGFLHNQPRRHAELLFLDLVPSLQLDPAQIYRVTWFISWSPCFSWGCLCEVRAFLQENTHVRLRIFAARIADHWPLYKEALQMLRDAGAQVSIMTYDEFKHCWDTFVDHQGAPFQPWDGLDEHSQALSRRLRAILQNQGN

SEQ ID NO: 1148 - protein, 191 aa, synthetic construct
MEASPASGPRHLMDPHTFYSNFNNKIGRHKTYLCYEVERLDNGTWVKMDQHRGFLHNQPRRHAELLFLDLVPSLQLDPAQIYRVTWFISWSPCFSWGCSCEVRAFLQENTHVRLRIFAARIADHWPLYKEALQMLRDAGAQVSIMTYDEFKHCWDTFVDHQGAPFQPWDGLDEHSQALSRRLRAILQNQGN

SEQ ID NO: 1149 - protein, 191 aa, synthetic construct
MEASPASGPRHLMDPHTFYSNFNNKIGRHKTYLCYEVERLDNGTWVKMDQHRGFLHNQPRRHAELLFLDLVPSLQLDPAQIYRVTWFISWSPCFSWGCTCEVRAFLQENTHVRLRIFAARIADHWPLYKEALQMLRDAGAQVSIMTYDEFKHCWDTFVDHQGAPFQPWDGLDEHSQALSRRLRAILQNQGN

SEQ ID NO: 1150 - protein, 191 aa, synthetic construct
MEASPASGPRHLMDPHTFYSNFNNKIGRHKTYLCYEVERLDNGTWVKMDQHRGFLHNQPRRHAELLFLDLVPSLQLDPAQIYRVTWFISWSPCFSWGCFCEVRAFLQENTHVRLRIFAARIADHWPLYKEALQMLRDAGAQVSIMTYDEFKHCWDTFVDHQGAPFQPWDGLDEHSQALSRRLRAILQNQGN

SEQ ID NO: 1151 - protein, 191 aa, synthetic construct
MEASPASGPRHLMDPHTFYSNFNNKIGRHKTYLCYEVERLDNGTWVKMDQHRGFLHNQPRRHAELLFLDLVPSLQLDPAQIYRVTWFISWSPCFSWGCYCEVRAFLQENTHVRLRIFAARIADHWPLYKEALQMLRDAGAQVSIMTYDEFKHCWDTFVDHQGAPFQPWDGLDEHSQALSRRLRAILQNQGN

SEQ ID NO: 1152 - protein, 191 aa, synthetic construct
MEASPASGPRHLMDPHTFYSNFNNKIGRHKTYLCYEVERLDNGTWVKMDQHRGFLHNQPRRHAELLFLDLVPSLQLDPAQIYRVTWFISWSPCKSWGCFCEVRAFLQENTHVRLRIFAARIADHWPLYKEALQMLRDAGAQVSIMTYDEFKHCWDTFVDHQGAPFQPWDGLDEHSQALSRRLRADLQNQGN

SEQ ID NO: 1153 - protein, 191 aa, synthetic construct
MEASPASGPRHLMDPHTFYSNFNNKIGRHKTYLCYEVERLDNGTWVKMDQHRGFLHNQPRRHAELLFLDLVPSLQLDPAQIYRVTWFISWSPCKSWGCACEVRAFLQENTHVRLRIFAARIADHWPLYKEALQMLRDAGAQVSIMTYDEFKHCWDTFVDHQGAPFQPWDGLDEHSQALSRRLRADLQNQGN

SEQ ID NO: 1154 - protein, 191 aa, synthetic construct
MEASPASGPRHLMDPHTFYSNFNNKIGRHKTYLCYEVERLDNGTWVKMDQHRGFLHNQPRRHAELLFLDLVPSLQLDPAQIYRVTWFISWSPCFSWGCACEVRAFLQENTHVRLRIFAARIADHWPLYKEALQMLRDAGAQVSIMTYDEFKHCWDTFVDHQGAPFQPWDGLDEHSQALSRRLRADLQNQGN

SEQ ID NO: 1155 - protein, 191 aa, synthetic construct
MEASPASGPRHLMDPHTFYSNFNNKIGRHKTYLCYEVERLDNGTWVKMDQHRGFLHNQPRRHAELLFLDLVPSLQLDPAQIYRVTWFISWSPCFSWGCACEVRAFLQENTHVRLRIFAARIADHWPLYKEALQMLRDAGAQVSIMTYDEFKHCWDTFVDHQGAPFQPWDGLDEHSQALSRRLRAIDQNQGN

SEQ ID NO: 1156 - skipped

SEQ ID NO: 1157 - protein, 191 aa, synthetic construct
MEASPASGPRHLMDPHTFYSNFNNKIGRHKTYLCYEVERLDNGTWVKMDQHRGFLHNQPRRHAELLFLDLVPSLQLDPAQIYRVTWFISWSPCFSWGCACEVRAFLQENTHVRLRIFAARIADHWPLYKEFLQMLRDAGAQVSIMTYDEFKHCWDTFVDHQGAPFQPWDGLDEHSQALSRRLRAILQNQGN

SEQ ID NO: 1158 - protein, 191 aa, synthetic construct
MEASPASGPRHLMDPHTFYSNFNNKIGRHKTYLCYEVERLDNGTWVKMDQHRGFLHNQPRRHAELLFLDLVPSLQLDPAQIYRVTWFISWSPCFSWGCACEVRAFLQENTHVRLRIFAARIADHWPLYKESLQMLRDAGAQVSIMTYDEFKHCWDTFVDHQGAPFQPWDGLDEHSQALSRRLRAILQNQGN

SEQ ID NO: 1159 - protein, 191 aa, synthetic construct
MEASPASGPRHLMDPHTFYSNFNNKIGRHKTYLCYEVERLDNGTWVKMDQHRGFLHNQPRRHAELLFLDLVPSLQLDPAQIYRVTWFISWSPCFSWGCACEVRAFLQENTHVRLRIFAARIADHWPLYKETLQMLRDAGAQVSIMTYDEFKHCWDTFVDHQGAPFQPWDGLDEHSQALSRRLRAILQNQGN

SEQ ID NO: 1160 - protein, 191 aa, synthetic construct
MEASPASGPRHLMDPHTFYSNFNNKIGRHKTYLCYEVERLDNGTWVKMDQHRGFLHNQPRRHAELLFLDLVPSLQLDPAQIYRVTWFISWSPCFSWGCACEVRAFLQENTHVRLRIFAARIADHWPLYKEYLQMLRDAGAQVSIMTYDEFKHCWDTFVDHQGAPFQPWDGLDEHSQALSRRLRAILQNQGN

SEQ ID NO: 1161 - skipped

SEQ ID NO: 1162 - protein, 191 aa, synthetic construct
MEASPASGPRHLMDPHTFYSNFNNKIGRHKTYLCYEVERLDNGTWVKMDQHRGFLHDQPRRHAELLFLDLVPSLQLDPAQIYRVTWFISWSPCFSWGCACEVRAFLQENTHVRLRIFAARIADHWPLYKEALQMLRDAGAQVSIMTYDEFKHCWDTFVDHQGAPFQPWDGLDEHSQALSRRLRAILQNQGN

SEQ ID NO: 1163 - protein, 191 aa, synthetic construct
MEASPASGPRHLMDPHTFYSNFNNKIGRHKTYLCYEVERLDNGTWVKMDQHRGFLHNEPRRHAELLFLDLVPSLQLDPAQIYRVTWFISWSPCFSWGCACEVRAFLQENTHVRLRIFAARIADHWPLYKEALQMLRDAGAQVSIMTYDEFKHCWDTFVDHQGAPFQPWDGLDEHSQALSRRLRAILQNQGN

SEQ ID NO: 1164 - protein, 191 aa, synthetic construct
MEASPASGPRHLMDPHTFYSNFNNKIGRHKTYLCYEVERLDNGTWVKMDQHRGFLHNQPRRHAELLFLDLVPSLQLDPAQIYRVTWFISWSPCFSWGCACKVRAFLQENTHVRLRIFAARIADHWPLYKEALQMLRDAGAQVSIMTYDEFKHCWDTFVDHQGAPFQPWDGLDEHSQALSRRLRAILQNQGN

SEQ ID NO: 1165 - protein, 191 aa, synthetic construct
MEASPASGPRHLMDPHTFYSNFNNKIGRHKTYLCYEVERLDNGTWVKMDQHRGFLHNQPRRHAELLFLDLVPSLQLDPAQIYRVTWFISWSPCFSWGCACHVRAFLQENTHVRLRIFAARIADHWPLYKEALQMLRDAGAQVSIMTYDEFKHCWDTFVDHQGAPFQPWDGLDEHSQALSRRLRAILQNQGN

SEQ ID NO: 1166 - skipped

SEQ ID NO: 1167 - protein, 191 aa, synthetic construct
MEASPASGPRHLMDPHTFYSNFNNKIGRHKTYLCYEVERLDNGTWVKMDQHRGFLHNQPRRHAELLFLDLVPSLQLDPAQIYRVTWFISWSPCFSWGCACFVRAFLQENTHVRLRIFAARIADHWPLYKEALQMLRDAGAQVSIMTYDEFKHCWDTFVDHQGAPFQPWDGLDEHSQALSRRLRAILQNQGN

SEQ ID NO: 1168 - protein, 191 aa, synthetic construct
MEASPASGPRHLMDPHTFYSNFNNKIGRHKTYLCYEVERLDNGTWVKMDQHRGFLHNQPRRHAELLFLDLVPSLQLDPAQIYRVTWFISWSPCFSWGCACQVRAFLQENTHVRLRIFAARIADHWPLYKEALQMLRDAGAQVSIMTYDEFKHCWDTFVDHQGAPFQPWDGLDEHSQALSRRLRAILQNQGN

SEQ ID NO: 1169 - protein, 191 aa, synthetic construct
MEASPASGPRHLMDPHTFYSNFNNKIGRHKTYLCYEVERLDNGTWVKMDQHRGFLHNQPRRHAELLFLDLVPSLQLDPAQIYRVTWFISWSPCFSWGCACAVRAFLQENTHVRLRIFAARIADHWPLYKEALQMLRDAGAQVSIMTYDEFKHCWDTFVDHQGAPFQPWDGLDEHSQALSRRLRAILQNQGN

SEQ ID NO: 1170 - protein, 191 aa, synthetic construct
MEASPASGPRHLMDPHTFYSNFNNKIGRHKTYLCYEVERLDNGTWVKMDQHRGFLHNQPRRHAELLFLDLVPSLQLDPAQIYRVTWFISWSPCFSWGCACEVREFLQENTHVRLRIFAARIADHWPLYKEALQMLRDAGAQVSIMTYDEFKHCWDTFVDHQGAPFQPWDGLDEHSQALSRRLRAILQNQGN

SEQ ID NO: 1171 - protein, 191 aa, synthetic construct
MEASPASGPRHLMDPHTFYSNFNNKIGRHKTYLCYEVERLDNGTWVKMDQHRGFLHNQPRRHAELLFLDLVPSLQLDPAQIYRVTWFISWSPCFSWGCACEVRQFLQENTHVRLRIFAARIADHWPLYKEALQMLRDAGAQVSIMTYDEFKHCWDTFVDHQGAPFQPWDGLDEHSQALSRRLRAILQNQGN

SEQ ID NO: 1172 - protein, 191 aa, synthetic construct
MEASPASGPRHLMDPHTFYSNFNNKIGRHKTYLCYEVERLDNGTWVKMDQHRGFLHNQPRRHAELLFLDLVPSLQLDPAQIYRVTWFISWSPCFSWGCACEVRKFLQENTHVRLRIFAARIADHWPLYKEALQMLRDAGAQVSIMTYDEFKHCWDTFVDHQGAPFQPWDGLDEHSQALSRRLRAILQNQGN

SEQ ID NO: 1173 - protein, 191 aa, synthetic construct
MEASPASGPRHLMDPHTFYSNFNNKIGRHKTYLCYEVERLDNGTWVKMDQHRGFLHNQPRRHAELLFLDLVPSLQLDPAQIYRVTWFISWSPCFSWGCACEVRLFLQENTHVRLRIFAARIADHWPLYKEALQMLRDAGAQVSIMTYDEFKHCWDTFVDHQGAPFQPWDGLDEHSQALSRRLRAILQNQGN

SEQ ID NO: 1174 - protein, 191 aa, synthetic construct
MEASPASGPRHLMDPHTFYSNFNNKIGRHKTYLCYEVERLDNGTWVKMDQHRGFLHNQPRRHAELLFLDLVPSLQLDPAQIYRVTWFISWSPCFSWGCACEVTAFLQENTHVRLRIFAARIADHWPLYKEALQMLRDAGAQVSIMTYDEFKHCWDTFVDHQGAPFQPWDGLDEHSQALSRRLRAILQNQGN

SEQ ID NO: 1175 - protein, 191 aa, synthetic construct
MEASPASGPRHLMDPHTFYSNFNNKIGRHKTYLCYEVERLDNGTWVKMDQHRGFLHNQPRRHAELLFLDLVPSLQLDPAQIYRVTWFISWSPCFSWGCACEVFAFLQENTHVRLRIFAARIADHWPLYKEALQMLRDAGAQVSIMTYDEFKHCWDTFVDHQGAPFQPWDGLDEHSQALSRRLRAILQNQGN

SEQ ID NO: 1176 - protein, 191 aa, synthetic construct
MEASPASGPRHLMDPHTFYSNFNNKIGRHKTYLCYEVERLDNGTWVKMDQHRGFLHNQPRRHAELLFLDLVPSLQLDPAQIYRVTWFISWSPCFSWGCACEVRAFLQENTHVRLRIFAARIADHWPLAKEALQMLRDAGAQVSIMTYDEFKHCWDTFVDHQGAPFQPWDGLDEHSQALSRRLRAILQNQGN

SEQ ID NO: 1177 - protein, 191 aa, synthetic construct
MEASPASGPRHLMDPHTFYSNFNNKIGRHKTYLCYEVERLDNGTWVKMDQHRGFLHNQPRRHAELLFLDLVPSLQLDPAQIYRVTWFISWSPCFSWGCACEVRAFLQENTHVRLRIFAARIADHWPLEKEALQMLRDAGAQVSIMTYDEFKHCWDTFVDHQGAPFQPWDGLDEHSQALSRRLRAILQNQGN

SEQ ID NO: 1178 - protein, 191 aa, synthetic construct
MEASPASGPRHLMDPHTFYSNFNNKIGRHKTYLCYEVERLDNGTWVKMDQHRGFLHNQPRRHAELLFLDLVPSLQLDPAQIYRVTWFISWSPCFSWGCACEVRAFLQENTHVRLRIFAARIADHWPLQKEALQMLRDAGAQVSIMTYDEFKHCWDTFVDHQGAPFQPWDGLDEHSQALSRRLRAILQNQGN

SEQ ID NO: 1179 - protein, 191 aa, synthetic construct
MEASPASGPRHLMDPHTFYSNFNNKIGRHKTYLCYEVERLDNGTWVKMDQHRGFLHNQPRRHAELLFLDLVPSLQLDPAQIYRVTWFISWSPCFSWGCACEVRAFLQENTHVRLRIFAARIADHWPLLKEALQMLRDAGAQVSIMTYDEFKHCWDTFVDHQGAPFQPWDGLDEHSQALSRRLRAILQNQGN

SEQ ID NO: 1180 - protein, 191 aa, synthetic construct
MEASPASGPRHLMDPHTFYSNFNNKIGRHKTYLCYEVERLDNGTWVKMDQHRGFLHNQPRRHAELLFLDLVPSLQLDPAQIYRVTWFISWSPCFSWGCACEVRAFLQENTHVRLRIFAARIADHWPLFKEALQMLRDAGAQVSIMTYDEFKHCWDTFVDHQGAPFQPWDGLDEHSQALSRRLRAILQNQGN

SEQ ID NO: 1181 - protein, 191 aa, synthetic construct
MEASPASGPRHLMDPHTFYSNFNNKIGRHKTYLCYEVERLDNGTWVKMDQHRGFLHNQPRRHAELLFLDLVPSLQLDPAQIYRVTWFISWSPCFSWGCACEVRAFLQENTHVRLRIFAARIADHWPLEKEALQMLRDAGAQVSIMTYDEFKHCWDTFVDHQGAPFQPWDGLDEHSQALSRRLRADLQNQGN

SEQ ID NO: 1182 - protein, 189 aa, synthetic construct
MEASPASGPRHLMDPHTFYSNFNNKIGRHKTYLCYEVERLDNGTWVKMDQHRGFLHNQPRRHAELLFLDLVPSLQLDPAQIYRVTWFISWSPCAGCACEVRAFLQENTHVRLRIFAARIADHWPLYKEALQMLRDAGAQVSIMTYDEFKHCWDTFVDHQGAPFQPWDGLDEHSQALSRRLRAILQNQGN

SEQ ID NO: 1183 - protein, 191 aa, synthetic construct
MEASPASGPRHLMDPHTFYSNFNNKIGRHKTYLCYEVERLDNGTWVKMDQHRGFLHNQPRRHAELLFLDLVPSLQLDPAQIYRVTWFISWSPCASWACACEVRAFLQENTHVRLRIFAARIADHWPLYKEALQMLRDAGAQVSIMTYDEFKHCWDTFVDHQGAPFQPWDGLDEHSQALSRRLRAILQNQGN

SEQ ID NO: 1184 - protein, 189 aa, synthetic construct
MEASPASGPRHLMDPHTFYSNFNNKIGRHKTYLCYEVERLDNGTWVKMDQHRGFLHNQPRRHAELLFLDLVPSLQLDPAQIYRVTWFISWSPCAACACEVRAFLQENTHVRLRIFAARIADHWPLYKEALQMLRDAGAQVSIMTYDEFKHCWDTFVDHQGAPFQPWDGLDEHSQALSRRLRAILQNQGN

SEQ ID NO: 1185 - protein, 191 aa, synthetic construct
MEASPASGPRHLMDPHTFYSNFNNKIGRHKTYLCYEVERLDNGTWVKMDQHRGFLHNQPRRHAELLFLDLVPSLQLDPAQIYRVTWFISWSPCYSWDCACEVRAFLQENTHVRLRIFAARIADHWPLYKEALQMLRDAGAQVSIMTYDEFKHCWDTFVDHQGAPFQPWDGLDEHSQALSRRLRAILQNQGN

SEQ ID NO: 1186 - protein, 191 aa, synthetic construct
MEASPASGPRHLMDPHTFYSNFNNKIGRHKTYLCYEVERLDNGTWVKMDQHRGFLHNQPRRHAELLFLDLVPSLQLDPAQIYRVTWFISWSPCYSWDCAREVRAFLQENTHVRLRIFAARIADHWPLYKEALQMLRDAGAQVSIMTYDEFKHCWDTFVDHQGAPFQPWDGLDEHSQALSRRLRAILQNQGN

SEQ ID NO: 1187 - protein, 191 aa, synthetic construct
MEASPASGPRHLMDPHTFYSNFNNKIGRHKTYLCYEVERLDNGTWVKMDQHRGFLHNQPRRHAELLFLDLVPSLQLDPAQIYRVTWFISWSPCASWGCACELRAFLQENTHVRLRIFAARIADHWPLYKEALQMLRDAGAQVSIMTYDEFKHCWDTFVDHQGAPFQPWDGLDEHSQALSRRLRAILQNQGN

SEQ ID NO: 1188 - protein, 191 aa, synthetic construct
MEASPASGPRHLMDPHTFYSNFNNKIGRHKTYLCYEVERLDNGTWVKMDQHRGFLHNQPRRHAELLFLDLVPSLQLDPAQIYRVTWFISWSPCASWGCACEVAAFLQENTHVRLRIFAARIADHWPLYKEALQMLRDAGAQVSIMTYDEFKHCWDTFVDHQGAPFQPWDGLDEHSQALSRRLRAILQNQGN

SEQ ID NO: 1189 - protein, 191 aa, synthetic construct
MEASPASGPRHLMDPHTFYSNFNNKIGRHKTYLCYEVERLDNGTWVKMDQHRGFLHNQPRRHAELLFLDLVPSLQLDPAQIYRVTWFISWSPCFSWACACKVRAFLQENTHVRLRIFAARIADHWPLYKEALQMLRDAGAQVSIMTYDEFKHCWDTFVDHQGAPFQPWDGLDEHSQALSRRLRAILQNQGN

SEQ ID NO: 1190 - protein, 191 aa, synthetic construct
MEASPASGPRHLMDPHTFYSNFNNKIGRHKTYLCYEVERLDNGTWVKMDQHRGFLHNQPRRHAELLFLDLVPSLQLDPAQIYRVTWFISWSPCFSWDCACEVRAFLQENTHVRLRIFAARIADHWPLYKEALQRLRDAGAQVSIMTYDEFKHCWDTFVDHQGAPFQPWDGLDEHSQALSRRLRAILQNQGN

SEQ ID NO: 1191 - protein, 191 aa, synthetic construct
MEASPASGPRHLMDPHTFYSNFNNKIGRHKTYLCYEVERLDNGTWVKMDQHRGFLHNQPRRHAELLFLDLVPSLQLDPAQIYRVTWFISWSPCASWGCSCEVRAFLQENTHVRLRIFAARIADHWPLYKEALQMLRDAGAQVSIMTYDEFKHCWDTFVDHQGAPFQPWDGLDEHSQALSRRLRAILQNQGN

SEQ ID NO: 1192 - protein, 191 aa, synthetic construct
MEASPASGPRHLMDPHTFYSNFNNKIGRHKTYLCYEVERLDNGTWVKMDQHRGFLHNQPRRHAELLFLDLVPSLQLDPAQIYRVTWFISWSPCFSWNCSCEVRAFLQENTHVRLRIFAARIADHWPLYKEALQMLRDAGAQVSIMTYDEFKHCWDTFVDHQGAPFQPWDGLDEHSQALSRRLRAILQNQGN

SEQ ID NO: 1193 - protein, 191 aa, synthetic construct
MEASPASGPRHLMDPHTFYSNFNNKIGRHKTYLCYEVERLDNGTWVKMDQHRGFLHNQPRRHAELLFLDLVPSLQLDPAQIYRVTWFISWSPCFSWGCSCRVRAFLQENTHVRLRIFAARIADHWPLYKEALQMLRDAGAQVSIMTYDEFKHCWDTFVDHQGAPFQPWDGLDEHSQALSRRLRAILQNQGN

SEQ ID NO: 1194 - protein, 191 aa, synthetic construct
MEASPASGPRHLMDPHTFYSNFNNKIGRHKTYLCYEVERLDNGTWVKMDQHRGFLHNQPRRHAELLFLDLVPSLQLDPAQIYRVTWFISWSPCFSWGCSCELRAFLQENTHVRLRIFAARIADHWPLYKEALQMLRDAGAQVSIMTYDEFKHCWDTFVDHQGAPFQPWDGLDEHSQALSRRLRAILQNQGN

SEQ ID NO: 1195 - protein, 191 aa, synthetic construct
MEASPASGPRHLMDPHTFYSNFNNKIGRHKTYLCYEVERLDNGTWVKMDQHRGFLHNQPRRHAELLFLDLVPSLQLDPAQIYRVTWFISWSPCFSWGCSCEVRQFLQENTHVRLRIFAARIADHWPLYKEALQMLRDAGAQVSIMTYDEFKHCWDTFVDHQGAPFQPWDGLDEHSQALSRRLRAILQNQGN

SEQ ID NO: 1196 - protein, 191 aa, synthetic construct
MEASPASGPRHLMDPHTFYSNFNNKIGRHKTYLCYEVERLDNGTWVKMDQHRGFLHNQPRRHAELLFLDLVPSLQLDPAQIYRVTWFISWSPCFSWGCSCEVRAFLSENTHVRLRIFAARIADHWPLYKEALQMLRDAGAQVSIMTYDEFKHCWDTFVDHQGAPFQPWDGLDEHSQALSRRLRAILQNQGN

SEQ ID NO: 1197 - protein, 191 aa, synthetic construct
MEASPASGPRHLMDPHTFYSNFNNKIGRHKTYLCYEVERLDNGTWVKMDQHRGFLHNQPRRHAELLFLDLVPSLQLDPAQIYRVTWFISWSPCFSWGCSCEVRAFLQENTHVRLRIFAARIADHWPLEKEALQMLRDAGAQVSIMTYDEFKHCWDTFVDHQGAPFQPWDGLDEHSQALSRRLRAILQNQGN

SEQ ID NO: 1198 - protein, 191 aa, synthetic construct
MEASPASGPRHLMDPHTFYSNFNNKIGRHKTYLCYEVERLDNGTWVKMDQHRGFLHNQPRRHAELLFLDLVPSLQLDPAQIYRVTWFISWSPCFSWGCSCEVRAFLQENTHVRLRIFAARIADHWPLYKEALQMLKDAGAQVSIMTYDEFKHCWDTFVDHQGAPFQPWDGLDEHSQALSRRLRAILQNQGN

SEQ ID NO: 1199 - protein, 191 aa, synthetic construct
MEASPASGPRHLMDPHTFYSNFNNKIGRHKTYLCYEVERLDNGTWVKMDQHRGFLHNQPRRHAELLFLDLVPSLQLDPAQIYRVTWFISWSPCFSWGCACKLAEFLQENTHVRLRIFAARIADHWPLYKEALQMLRDAGAQVSIMTYDEFKHCWDTFVDHQGAPFQPWDGLDEHSQALSRRLRAILQNQGN

SEQ ID NO: 1200 - protein, 191 aa, synthetic construct
MEASPASGPRHLMDPHTFYSNFNNKIGRHKTYLCYEVERLDNGTWVKMDQHRGFLHNQPRRHAELLFLDLVPSLQLDPAQIYRVTWFISWSPCFSWGCACKVAEFLQENTHVRLRIFAARIADHWPLYKEALQMLRDAGAQVSIMTYDEFKHCWDTFVDHQGAPFQPWDGLDEHSQALSRRLRAILQNQGN

SEQ ID NO: 1201 - protein, 191 aa, synthetic construct
MEASPASGPRHLMDPHTFYSNFNNKIGRHKTYLCYEVERLDNGTWVKMDQHRGFLHNQPRRHAELLFLDLVPSLQLDPAQIYRVTWFISWSPCFSWGCACKVRAFLQENTHVRLRIFAARIADHWPLIKEALQMLRDAGAQVSIMTYDEFKHCWDTFVDHQGAPFQPWDGLDEHSQALSRRLRAILQNQGN

SEQ ID NO: 1202 - protein, 191 aa, synthetic construct
MEASPASGPRHLMDPHTFYSNFNNKIGRHKTYLCYEVERLDNGTWVKMDQHRGFLHNQPRRHAELLFLDLVPSLQLDPAQIYRVTWFISWSPCFSWGCACKVRAFLQENTHVRLRIFAARIADHWPLYKEGLQMLRDAGAQVSIMTYDEFKHCWDTFVDHQGAPFQPWDGLDEHSQALSRRLRAILQNQGN

SEQ ID NO: 1203 - protein, 191 aa, synthetic construct
MEASPASGPRHLMDPHTFYSNFNNKIGRHKTYLCYEVERLDNGTWVKMDQHRGFLHNQPRRHAELLFLDLVPSLQLDPAQIYRVTWFISWSPCFSWGCACEVAAFLQENTHVRLRIFAARIADHWPLYKEGLQMLRDAGAQVSIMTYDEFKHCWDTFVDHQGAPFQPWDGLDEHSQALSRRLRAILQNQGN

SEQ ID NO: 1204 - protein, 191 aa, synthetic construct
MEASPASGPRHLMDPHTFYSNFNNKIGRHKTYLCYEVERLDNGTWVKMDQHRGFLHNQPRRHAELLFLDLVPSLQLDPAQIYRVTWFISWSPCFSWGCACKVAAFLQENTHVRLRIFAARIADHWPLIKEGLQMLRDAGAQVSIMTYDEFKHCWDTFVDHQGAPFQPWDGLDEHSQALSRRLRAILQNQGN

SEQ ID NO: 1205 - protein, 191 aa, synthetic construct
MEASPASGPRHLMDPHTFYSNFNNKIGRHKTYLCYEVERLDNGTWVKMDQHRGFLHNQPRRHAELLFLDLVPSLQLDPAQIYRVTWFISWSPCFSWGCACEVREFLQENTHVRLRIFAARIADHWPLYKAALQMLRDAGAQVSIMTYDEFKHCWDTFVDHQGAPFQPWDGLDEHSQALSRRLRAILQNQGN

SEQ ID NO: 1206 - protein, 191 aa, synthetic construct
MEASPASGPRHLMDPHTFYSNFNNKIGRHKTYLCYEVERLDNGTWVKMDQHRGFLHNQPRRHAELLFLDLVPSLQLDPAQIYRVTWFISWSPCFSWGCACEVREFLQENTHVRLRIFAARIADHWPLYKEGLQMLRDAGAQVSIMTYDEFKHCWDTFVDHQGAPFQPWDGLDEHSQALSRRLRAILQNQGN

SEQ ID NO: 1207 - protein, 191 aa, synthetic construct
MEASPASGPRHLMDPHTFYSNFNNKIGRHKTYLCYEVERLDNGTWVKMDQHRGFLHNQPRRHAELLFLDLVPSLQLDPAQIYRVTWFISWSPCFSWGCACEVREFLQENTHVRLRIFAARIADHWPLYKEALQRLRDAGAQVSIMTYDEFKHCWDTFVDHQGAPFQPWDGLDEHSQALSRRLRAILQNQGN

SEQ ID NO: 1208 - protein, 191 aa, synthetic construct
MEASPASGPRHLMDPHTFYSNFNNKIGRHKTYLCYEVERLDNGTWVKMDQHRGFLHNQPRRHAELLFLDLVPSLQLDPAQIYRVTWFISWSPCFSWGCACEVREFLQENTHVRLRIFAARIADHWPLYKAGLQRLRDAGAQVSIMTYDEFKHCWDTFVDHQGAPFQPWDGLDEHSQALSRRLRAILQNQGN

SEQ ID NO: 1209 - protein, 191 aa, synthetic construct
MEASPASGPRHLMDPHTFYSNFNNKIGRHKTYLCYEVERLDNGTWVKMDQHRGFLHNQPRRHAELLFLDLVPSLQLDPAQIYRVTWFISWSPCFSWGCACEVRAFLQENTHVRLRIFAARIADHWPLYKEALQMLHDAGAQVSIMTYDEFKHCWDTFVDHQGAPFQPWDGLDEHSQALSRRLRAILQNQGN

SEQ ID NO: 1210 - skipped

SEQ ID NO: 1211 - protein, 191 aa, synthetic construct
MEASPASGPRHLMDPHTFYSNFNNKIGRHKTYLCYEVERLDNGTWVKMDQHRGFLHNQPRRHAELLFLDLVPSLQLDPAQIYRVTWFISWSPCFSWGCACEVRAFLQENTHVRLRIFAARIADHWPLYQEALQMLRDAGAQVSIMTYDEFKHCWDTFVDHQGAPFQPWDGLDEHSQALSRRLRAILQNQGN

SEQ ID NO: 1212 - protein, 191 aa, synthetic construct
MEASPASGPRHLMDPHTFYSNFNNKIGRHKTYLCYEVERLDNGTWVKMDQHRGFLHNQPRRHAELLFLDLVPSLQLDPAQIYRVTWFISWSPCFSWGCACEVRAFLQENTHVRLRIFAARIADHWPLYKEALRMLRRAGAQVSIMTYDEFKHCWDTFVDHQGAPFQPWDGLDEHSQALSRRLRAILQNQGN

SEQ ID NO: 1213 - protein, 191 aa, synthetic construct
MEASPASGPRHLMDPHTFYSNFNNKIGRHKTYLCYEVERLDNGTWVKMDQHRGFLHNQPRRHAELLFLDLVPSLQLDPAQIYRVTWFISWSPCFSWGCACEVRAFLQENTHVRLRIFAARIADHWPLYKEALRMLHDAGAQVSIMTYDEFKHCWDTFVDHQGAPFQPWDGLDEHSQALSRRLRAILQNQGN

SEQ ID NO: 1214 - protein, 191 aa, synthetic construct
MEASPASGPRHLMDPHTFYSNFNNKIGRHKTYLCYEVERLDNGTWVKMDQHRGFLHNQPRRHAELLFLDLVPSLQLDPAQIYRVTWFISWSPCFSWGCACEVRAFLQENTHVRLRIFAARIADHWPLYKEALQRLRRAGAQVSIMTYDEFKHCWDTFVDHQGAPFQPWDGLDEHSQALSRRLRAILQNQGN

SEQ ID NO: 1215 - protein, 189 aa, synthetic construct
MEASPASGPRHLMDPHTFYSNFNNKIGRHKTYLCYEVERLDNGTWVKMDQHRGFLHNQPRRHAELLFLDLVPSLQLDPAQIYRVTWFISWSPCFSCVCEVRAFLQENTHVRLRIFAARIADHWPLYKEALQMLRDAGAQVSIMTYDEFKHCWDTFVDHQGAPFQPWDGLDEHSQALSRRLRAILQNQGN

SEQ ID NO: 1216 - protein, 189 aa, synthetic construct
MEASPASGPRHLMDPHTFYSNFNNKIGRHKTYLCYEVERLDNGTWVKMDQHRGFLHNQPRRHAELLFLDLVPSLQLDPAQIYRVTWFISWSPCFSCLCEVRAFLQENTHVRLRIFAARIADHWPLYKEALQMLRDAGAQVSIMTYDEFKHCWDTFVDHQGAPFQPWDGLDEHSQALSRRLRAILQNQGN

SEQ ID NO: 1217 - protein, 189 aa, synthetic construct
MEASPASGPRHLMDPHTFYSNFNNKIGRHKTYLCYEVERLDNGTWVKMDQHRGFLHNQPRRHAELLFLDLVPSLQLDPAQIYRVTWFISWSPCFSCSCEVRAFLQENTHVRLRIFAARIADHWPLYKEALQMLRDAGAQVSIMTYDEFKHCWDTFVDHQGAPFQPWDGLDEHSQALSRRLRAILQNQGN

SEQ ID NO: 1218 - protein, 189 aa, synthetic construct
MEASPASGPRHLMDPHTFYSNFNNKIGRHKTYLCYEVERLDNGTWVKMDQHRGFLHNQPRRHAELLFLDLVPSLQLDPAQIYRVTWFISWSPCFSCTCEVRAFLQENTHVRLRIFAARIADHWPLYKEALQMLRDAGAQVSIMTYDEFKHCWDTFVDHQGAPFQPWDGLDEHSQALSRRLRAILQNQGN

SEQ ID NO: 1219 - protein, 189 aa, synthetic construct
MEASPASGPRHLMDPHTFYSNFNNKIGRHKTYLCYEVERLDNGTWVKMDQHRGFLHNQPRRHAELLFLDLVPSLQLDPAQIYRVTWFISWSPCFSCFCEVRAFLQENTHVRLRIFAARIADHWPLYKEALQMLRDAGAQVSIMTYDEFKHCWDTFVDHQGAPFQPWDGLDEHSQALSRRLRAILQNQGN

SEQ ID NO: 1220 - protein, 189 aa, synthetic construct
MEASPASGPRHLMDPHTFYSNFNNKIGRHKTYLCYEVERLDNGTWVKMDQHRGFLHNQPRRHAELLFLDLVPSLQLDPAQIYRVTWFISWSPCFSCYCEVRAFLQENTHVRLRIFAARIADHWPLYKEALQMLRDAGAQVSIMTYDEFKHCWDTFVDHQGAPFQPWDGLDEHSQALSRRLRAILQNQGN

SEQ ID NO: 1221 - protein, 189 aa, synthetic construct
MEASPASGPRHLMDPHTFYSNFNNKIGRHKTYLCYEVERLDNGTWVKMDQHRGFLHNQPRRHAELLFLDLVPSLQLDPAQIYRVTWFISWSPCKSCFCEVRAFLQENTHVRLRIFAARIADHWPLYKEALQMLRDAGAQVSIMTYDEFKHCWDTFVDHQGAPFQPWDGLDEHSQALSRRLRADLQNQGN

SEQ ID NO: 1222 - protein, 189 aa, synthetic construct
MEASPASGPRHLMDPHTFYSNFNNKIGRHKTYLCYEVERLDNGTWVKMDQHRGFLHNQPRRHAELLFLDLVPSLQLDPAQIYRVTWFISWSPCFSCACEVRAFLQENTHVRLRIFAARIADHWPLYKEVLQMLRDAGAQVSIMTYDEFKHCWDTFVDHQGAPFQPWDGLDEHSQALSRRLRAILQNQGN

SEQ ID NO: 1223 - protein, 189 aa, synthetic construct
MEASPASGPRHLMDPHTFYSNFNNKIGRHKTYLCYEVERLDNGTWVKMDQHRGFLHNQPRRHAELLFLDLVPSLQLDPAQIYRVTWFISWSPCFSCACEVRAFLQENTHVRLRIFAARIADHWPLYKEFLQMLRDAGAQVSIMTYDEFKHCWDTFVDHQGAPFQPWDGLDEHSQALSRRLRAILQNQGN

SEQ ID NO: 1224 - protein, 189 aa, synthetic construct
MEASPASGPRHLMDPHTFYSNFNNKIGRHKTYLCYEVERLDNGTWVKMDQHRGFLHNQPRRHAELLFLDLVPSLQLDPAQIYRVTWFISWSPCFSCACEVRAFLQENTHVRLRIFAARIADHWPLYKESLQMLRDAGAQVSIMTYDEFKHCWDTFVDHQGAPFQPWDGLDEHSQALSRRLRAILQNQGN

SEQ ID NO: 1225 - protein, 189 aa, synthetic construct
MEASPASGPRHLMDPHTFYSNFNNKIGRHKTYLCYEVERLDNGTWVKMDQHRGFLHNQPRRHAELLFLDLVPSLQLDPAQIYRVTWFISWSPCFSCACEVRAFLQENTHVRLRIFAARIADHWPLYKETLQMLRDAGAQVSIMTYDEFKHCWDTFVDHQGAPFQPWDGLDEHSQALSRRLRAILQNQGN

SEQ ID NO: 1226 - protein, 189 aa, synthetic construct
MEASPASGPRHLMDPHTFYSNFNNKIGRHKTYLCYEVERLDNGTWVKMDQHRGFLHNQPRRHAELLFLDLVPSLQLDPAQIYRVTWFISWSPCFSCACEVRAFLQENTHVRLRIFAARIADHWPLYKEYLQMLRDAGAQVSIMTYDEFKHCWDTFVDHQGAPFQPWDGLDEHSQALSRRLRAILQNQGN

SEQ ID NO: 1227 - protein, 189 aa, synthetic construct
MEASPASGPRHLMDPHTFYSNFNNKIGRHKTYLCYEVERLDNGTWVKMDQHRGFLHNQPRRHAELLFLDLVPSLQLDPAQIYRVTWFISWSPCFSCACEVRAFLQENTHVRLRIFAARIADHWPLYKEGLQMLRDAGAQVSIMTYDEFKHCWDTFVDHQGAPFQPWDGLDEHSQALSRRLRAILQNQGN

SEQ ID NO: 1228 - protein, 189 aa, synthetic construct
MEASPASGPRHLMDPHTFYSNFNNKIGRHKTYLCYEVERLDNGTWVKMDQHRGFLHNQPRRHAELLFLDLVPSLQLDPAQIYRVTWFISWSPCASCACEVRAFLQENTHVRLRIFAARIADHWPLYKEALQMLRDAGAQVSIMTYDEFKHCWDTFVDHQGAPFQPWDGLDEHSQALSRRLRAILQNQGN

SEQ ID NO: 1229 - protein, 189 aa, synthetic construct
MEASPASGPRHLMDPHTFYSNFNNKIGRHKTYLCYEVERLDNGTWVKMDQHRGFLHNQPRRHAELLFLDLVPSLQLDPAQIYRVTWFISWSPCYSCAREVRAFLQENTHVRLRIFAARIADHWPLYKEALQMLRDAGAQVSIMTYDEFKHCWDTFVDHQGAPFQPWDGLDEHSQALSRRLRAILQNQGN

SEQ ID NO: 1230 - protein, 189 aa, synthetic construct
MEASPASGPRHLMDPHTFYSNFNNKIGRHKTYLCYEVERLDNGTWVKMDQHRGFLHNQPRRHAELLFLDLVPSLQLDPAQIYRVTWFISWSPCASCSCEVRAFLQENTHVRLRIFAARIADHWPLYKEALQMLRDAGAQVSIMTYDEFKHCWDTFVDHQGAPFQPWDGLDEHSQALSRRLRAILQNQGN

SEQ ID NO: 1231 - protein, 189 aa, synthetic construct
MEASPASGPRHLMDPHTFYSNFNNKIGRHKTYLCYEVERLDNGTWVKMDQHRGFLHNQPRRHAELLFLDLVPSLQLDPAQIYRVTWFISWSPCFSCACKVRAFLQENTHVRLRIFAARIADHWPLYKEGLQMLRDAGAQVSIMTYDEFKHCWDTFVDHQGAPFQPWDGLDEHSQALSRRLRAILQNQGN

SEQ ID NO: 1232 - protein, 189 aa, synthetic construct
MEASPASGPRHLMDPHTFYSNFNNKIGRHKTYLCYEVERLDNGTWVKMDQHRGFLHNQPRRHAELLFLDLVPSLQLDPAQIYRVTWFISWSPCFSCACEVAAFLQENTHVRLRIFAARIADHWPLYKEGLQMLRDAGAQVSIMTYDEFKHCWDTFVDHQGAPFQPWDGLDEHSQALSRRLRAILQNQGN

SEQ ID NO: 1233 - protein, 189 aa, synthetic construct
MEASPASGPRHLMDPHTFYSNFNNKIGRHKTYLCYEVERLDNGTWVKMDQHRGFLHNQPRRHAELLFLDLVPSLQLDPAQIYRVTWFISWCFSWGCACEVRAFLQENTHVRLRIFAARIADHWPLYKEALQMLRDAGAQVSIMTYDEFKHCWDTFVDHQGAPFQPWDGLDEHSQALSRRLRAILQNQGN

SEQ ID NO: 1234 - protein, 189 aa, synthetic construct
MEASPASGPRHLMDPHTFYSNFNNKIGRHKTYLCYEVERLDNGTWVKMDQHRGFLHNQPRRHAELLFLDLVPSLQLDPAQIYRVTWFISWSCSWGCACEVRAFLQENTHVRLRIFAARIADHWPLYKEALQMLRDAGAQVSIMTYDEFKHCWDTFVDHQGAPFQPWDGLDEHSQALSRRLRAILQNQGN

SEQ ID NO: 1235 - protein, 189 aa, synthetic construct
MEASPASGPRHLMDPHTFYSNFNNKIGRHKTYLCYEVERLDNGTWVKMDQHRGFLHNQPRRHAELLFLDLVPSLQLDPAQIYRVTWFISWSPCWGCACEVRAFLQENTHVRLRIFAARIADHWPLYKEALQMLRDAGAQVSIMTYDEFKHCWDTFVDHQGAPFQPWDGLDEHSQALSRRLRAILQNQGN

SEQ ID NO: 1236 - skipped

SEQ ID NO: 1237 - protein, 189 aa, synthetic construct
MEASPASGPRHLMDPHTFYSNFNNKIGRHKTYLCYEVERLDNGTWVKMDQHRGFLHNQPRRHAELLFLDLVPSLQLDPAQIYRVTWFISWSPCFSWCCEVRAFLQENTHVRLRIFAARIADHWPLYKEALQMLRDAGAQVSIMTYDEFKHCWDTFVDHQGAPFQPWDGLDEHSQALSRRLRAILQNQGN

SEQ ID NO: 1238 - protein, 230 aa, synthetic construct
  VARIANT 30: note = Can be any hydrophobic residue
  VARIANT 32: note = Can be any hydrophobic residue
  VARIANT 50..53: note = Can be any hydrophobic residue
  VARIANT 59: note = Can be any hydrophobic residue
  VARIANT 60: note = Can be any charged residue
  VARIANT 62: note = Can be any small residue
  VARIANT 63: note = Can be any alcohol
  VARIANT 68: note = Can be any negatively charged residue
  VARIANT 69: note = Can be any polar residue
  VARIANT 70: note = Can be any hydrophobic residue
  VARIANT 73: note = Can be any hydrophobic residue
  VARIANT 75: note = Can be any hydrophobic residue
  VARIANT 76: note = Can be any small residue
  VARIANT 77: note = Can be any polar residue
  VARIANT 88: note = Can be any hydrophobic residue
  VARIANT 91: note = Can be any turnlike residue
  VARIANT 92: note = Can be any hydrophobic residue
  VARIANT 96: note = Can be any charged residue
  VARIANT 97: note = Can be any hydrophobic residue
  VARIANT 98: note = Can be any hydrophobic residue
  VARIANT 101: note = Can be any hydrophobic residue
  VARIANT 102: note = Can be any polar residue
  VARIANT 106: note = Can be any turnlike residue
  VARIANT 107: note = Can be any polar residue
  VARIANT 106..115: note = Can be any hydrophobic residue
  VARIANT 130: note = Can be any hydrophobic residue
  VARIANT 134: note = Can be any hydrophobic residue
  VARIANT 139: note = Can be any aromatic residue
  VARIANT 141: note = Can be any polar residue
  VARIANT 143: note = Can be any polar residue
  VARIANT 149: note = Can be any hydrophobic residue
  VARIANT 151: note = Can be any hydrophobic residue
  VARIANT 163: note = Can be any polar residue
  VARIANT 166: note = Can be any polar residue
  VARIANT 167: note = Can be any turnlike residue
  VARIANT 168: note = Can be any turnlike residue
  VARIANT 170: note = Can be any hydrophobic residue
  VARIANT 171: note = Can be any polar residue
  VARIANT 172: note = Can be any aliphatic residue
  VARIANT 173: note = Can be any tiny residue
  VARIANT 181: note = Can be any charged residue
  VARIANT 183: note = Can be any hydrophobic residue
  VARIANT 186: note = Can be any hydrophobic residue
  VARIANT 190: note = Can be any polar residue
  VARIANT 191: note = Can be any polar residue
  VARIANT 192: note = Can be any turnlike residue
  VARIANT 195: note = Can be any aromatic residue
  VARIANT 199: note = Can be any polar residue
  VARIANT 200: note = Can be any turnlike residue
  VARIANT 204: note = Can be any polar residue
  VARIANT 211: note = Can be any positively charged residue
  VARIANT 213: note = Can be any polar residue
XXXXXXXXXXXXXXXXXXXXXXXXXMXXXXFXXXFXNXXXXXXXXXXXXXXXXYEVXXXXXXXXVXXXXXRGXLXXXXXXXXXXXXXXHAXXXFLXXXXXXXLXXXXXXXXXXXXXXXXXXXXXXXXXXXXXFXXXXXXXXXXIFXXXXIXXXXXXXXXXXLXXLXXXGXXXXIMTXXXFXHXWXXFVXXXXXXXXPWXXLXEXXXXXXXXLXXXXQXXXXXXXXXXXXX

SEQ ID NO: 1239 - protein, 230 aa, synthetic construct
  VARIANT 30: note = Can be any hydrophobic residue
  VARIANT 78: note = Can be any small residue
  VARIANT 79: note = Can be any positively charged residue
  VARIANT 124: note = Can be any hydrophobic residue
  VARIANT 125: note = Can be any small residue
  VARIANT 128: note = Can be any small residue
  VARIANT 210: note = Can be any turnlike residue
XXXXXXXXXXXXXMEASPASGPRHLMDPHXFYSNFNNXXXXXXXIGRHKTYLCYEVERLDNGTXVKMDQHRGFLHNQXXXXXXXXXXRHAELLFLDLVPSLQLDPAQIYRVTWFISWSPCFXXXXCAXEVRAFLQENTHVRLRIFAXARIADHWPLYKEXALQMLRDAGAQVSIMTYDEFKHCWDTFVDHQGAPFQPWDGLDEHSQALSXRLRAILQNQGNXXXXXXXXX

SEQ ID NO: 1240 - protein, 230 aa, synthetic construct
  VARIANT 79: note = Can be any positively charged residue
  VARIANT 30: note = Can be any hydrophobic residue
  VARIANT 78: note = Can be any small residue
  VARIANT 128: note = Can be any small residue
  VARIANT 210: note = Can be any turnlike amino acid
XXXXXXXXXXXXXMEASPASGPRHLMDPHXFYSNFNNXXXXXXXIGRHKTYLCYEVERLDNGTXVKMDQHRGFLHNQXXXXXXXXXXRHAELLFLDLVPSLQLDPAQIYRVTWFISWSPCFXSWGCAXEVRAFLQENTHVRLRIFAXARIADHWPLYKEXALQMLRDAGAQVSIMTYDEFKHCWDTFVDHQGAPFQFWDGLDEHSQALSXRLRAILQNQGNXXXXXXXXX

SEQ ID NO: 1241 - protein, 230 aa, synthetic construct
XXXXXXXXXXXXXMEASPASGPRHLMDPHTFYSNFNNXXXXXXXIGRHKTYLCYEVERLDNGTWVKMDQHRGFLHNQPXXXXXXXXXRHAELLFLDLVPSLQLDPAQIYRVTWFISWSPCFXSWGCACEVRAFLQENTHVRLRIFAXARIADHWPLYKEXALQMLRDAGAQVSIMTYDEFKHCWDTFVDHQGAPFQPWDGLDEHSQALSRRLRAILQNQGNXXXXXXXXX
